United States Patent Application Publication US 2026/0058010 A1 - sequence listing, part 38

SEQ ID NO: 451 - DNA, 165720 bp, Homo sapiens
  source 1..165720: mol_type = genomic DNA
gcatgatgcaaggaaacaagtgaaaaggtatcttaagaaaacagataataggctgtttcgaatagagtatgagtatgggtgagcactgcaaaatagtagaataaattgttgagttggatctcatttggtaatgcatttgaaataaagggatttgctttgaaccaagactggttctaagcctggaactacagaataagttccaaaattgggtgtctaagaactctgaatacctctccaatatttaccagtggtcaagtcaaactcgttttgctcattaatggtataagtcggctggagctgagaattggcattatagagaatgtttttgagacagagtcttgctctgtcacccaggatggacttcagtggcatgatctcaactcactgcaacctctgcctcctgagttaagtgattctgctgcctcaacctcccgagtagctggcgttacaggtacccgccaccatgcctggataatttttattttttttagtagagatggcttgcaccatgttggacaggctagtctcaaactcctgacctcatgtgttcttcccaccttggcctcccaaagtgctgggatcacaggtcactgcacccagcctagagtatttaatatacattcatataaaaaagaagcactggtttcataaaacaaatgtacattatatgagattccacttcataaaagcatgtatgtgtaccccaacactaaattggcccttttaacaaaatatcagactttgtcctacttaactggaaagattatctatattttataaagaagagaaataacataatagtaaggctgtgatttcctcttttttgcaaaaactatttttgaaaagtattactgaattgataacatatatatggagagatttaaaatactagataagggagcttattccaatgaatttacagaaaggtaggtattttagtcaactaaaaatataaataaaaattatcaattcacttatttggatacagcagtcatgccagagtttataaatatagtgaaatcactgaagatttttttttacccccaaaactgaaaaaaatggcagtgtaccttgtgaattttttaaatgaaaaaagaatacgaaatgatgaaggcccttatctgatgatgacaaactagaaaactgaaatgtaaaggggaaaatgtgagtatgtgtttccctccagcaaattaaagacagggtacatagattcaagaggttgcgctttgaggataaaaagctgggccctgtgcagttttccaagacaacctctgggcgccgctgtcgaccaaaaggaagtgaaggcttctcaattctgcaggagcgtcaggcagggtgccttcctgctttgtccggtgcactgagcacagacgctgctcctgttcaccctcgagcgcctaactaataagtcctaagctcaaatcacagaagtccagggtgctgccatttctttttgaaaaacatcccagaggaaagaagctccgcggagagttcctgaaatgcagagagccagagaagccgaaatgatgaaaagtcaggtactgtttcccttcctgctgtctttgttctgcggggccatctcccagcagatccgatacacgattccagaggagctagccaacggctcacgggtggggaaacttgccaaggatctggggctcagtgtccgggagttgccaactcgaaaactgcgggttagtgcagaggattatttcaacgttagtttggagagcggggatttgttagtgaacggtaggatagatcgagagaagatttgcggaaggaaacttgagtgtgcactagaattcgaaacggtcgctgaaaacccaatgaatgttttccacgtggttgttgtaatccaagatattaatgacaatgcaccacgtttcgttgcaaaaggcattgacttagaaatttgtgagtcagccttacccggggtaaaattctctctggattctgctcaagatgcagatgtggaaggcaattcactgaagttatacaccatcaaccccaatcaatacttctctctgtcaacgaaggaaagtcctgatggaagtaaatatccggtattactgctggaaaaacctctagacagggaacatcagagctctcatcgcttaatcctgactgccatggatggcggggacccgcctctaagcggcaccacccatatctggatccgagttacggatgccaatgataatgctcccgtgtttagccaggaggtatacagggttagcctccaagaaaacgtaccgtggggaacctccgtgctgcgggtgatggccacagaccaggatgagggcattaatgcagagatcacctatgccttcctcaattccccaataagtaccagcctcttcaatctcaatccaaatactggcgacatcacaaccaatggcacattggattttgaagagacaagtagatatgtgttgagtgtggaagctaaggatggaggagtacacacagctcactgtaatgttcaaatagaaattgttgacgagaatgacaatgccccagaggtgacattcatgtccttctctaaccagattccagaggattcagaccttggaactgtaatagccctcataaaagtgcgagacaaggattctgggcaaaatggcatggtgacatgctatactcaggaagaagttcctttcaaattagaatccacctcgaagaattattacaagctggtgattgctggagccctaaaccgggagcagacagcagactacaacgtcacaatcatagccaccgacaagggcaaaccagccctttcctccaggacaagcatcaccctgcacatctccgacatcaacgacaatgcacctgttttccatcaggcctcctatgtggtccacgtgtctgagaacaacccacctggcgcctccattgcacaagtaagcgcctccgacccggatttgggacccaacggcagagtctcctactctattctggccagtgacctggagccgcgggagctgttgtcctacgtgtccgtgagcccgcagagcggggtggtgttcgcgcagcgcgccttcgaccacgagcagctgcgcgccttcgagctcacactgcaggccagggaccagggctcccccgcgctcagcgccaacgtgagcctgcgcgtgttggtgggcgacctcaatgacaatgcgccacgggtgctgtaccccgcgctggggcctgatggctccgccctcttcgatatggtgccacgcgccgcagagcccggctacctggtgaccaaggtggtggcggtggacgcagactcaggacacaacgcttggctgtcctaccacgtgctgcaggccagcgagcccgggctcttcagcctggggttgcgcacgggtgaggtgcgcacagcgcgtgccttgggcgacagggacgcggcccgccagcgcctgctggtcgctgtgcgtgatggaggacagccgccactctccgccaccgccacgctgcacctaatcttcgcggatagcctgcaagaggtattgccagacctcagcgaccgccctgagccctctgacccccagacggaactgcagttttacctggttgtggccttggccttgatctcagtgctctttctcctcgcggtgattctagcgatcgccctgcgcctgcgacgttcctccagcctcgacactgagggctgctttcaaaccggtctctgctccaagtctgggcccggggttcctcccaaccacagcgaggggactttgccctattcctacaatctatgtattgcctctcattctgcaaagacagagtttaattctctcaacctgacaccggaaatggctccccctcaggatctgctgtgtgatgatccttctatggttgtatgtgccagtaatgaagatcacaaaatcgcttatgacccttctttgtcttcgcacgtgagtttctgcaaatctagttaaattttatatatggcggccgggcgcggtggctcaagcctgtaatcccagcacttaaccaggctgaggcaggtggatcacttgaggtcaggagtttgagaccagcatagccaagatggtaaaacccggtctactaaaattacaaaaattagttgggtgtggtggcacgcgcctgtagtcccagttactcaggaagctgagacaggaggatcgcttgagcccgggaggtggagattgtagtgagccaagagtgtgccactgcactccagcctgggtgatgggagggaaactgtctaaaaaaacaaacaaacaaaaattatatattgcattttcttctcattggtgtataagtaattttgattttctttcattgttctagtgatggtatctactgcgggagggggtactagatagatggagattgctttcttgattgctcagtagtcttggcaatttaattttcaatctttactgttggcatttctgtatggttggcaaatcttgctaaagagacctgtttcctagatgttaacacttagtaatagcagtgccttttcttagttgatatgcaatactatattttcaagtcattttattcttagctctttataaatgtatttagagttcttcccacccaagttaaagttcatcaattacattaattatgtaattgatgtaattatgtattaatgtaattatgtaattaatgtaatcttcatcaattacattctagtttgtctttttgcagcaacatgtatgtttaatacagccttccaattattaagactcttaacactttgtctcatcacaagtagcaaatattgtccaattttatatttgcatcactaactttgagtcaatattattcccactctataatttcagtcaatgatatttcataattttcttaaccattcctaaattatttgtttttatgctctttctattttgtctctattaaaacaaagaatgtaatgaacatttgggtttataaagcgttttccatacttcttgtttctttagtgtagatttctgaggaattagttaaatctataaacatgttgagatttttttaatgcatactgtcaaatttatttccaaacatcttatttcacctctcaatcatccgcagtttgtgcggtctttgaggattgtgaaaaacacgtttaatctactctctcaaagtctgagggtttttaaattctgtatagctaatgcccttttgtatgagtcatttctactgctaattgttaagtgaggaataagcttaagaactgatgtactgctttatctcaaattttcacagattagtaaattactgtaagtattcataagaaagaaagcgatggcacatgcaatgataatccatgttcggctaccaaaacatttccttttactggctatttctaaaatgagagctaaagtaaagttagaaattgtaaaataatactgaatgtgtcatgtgaaaaaatcactaaactattatctgcactttatagttattcagtctaacttttctttttatttcttttttatttttaagatcagagttatttacccattgttttaggctttgcatttgaactggtcattcatgaaacattgaaaggtttcataaaaattactactctatgaaaggtattgttctaaagattgagaacacattgtgaacaagatagtcatatgcatagcttgtggccaagaatctactgtacacaaaattaaggagcaaattctcttcccaaacctattatcctatttgtcaatctcatttgtacagggtaaggctaactcttgaacagtaggtgagttttttgcaagggaattgaagcattgccccaggttctagagggtcaactcctgtgaggaaacttgttactgcataaattgggactaaagccagacctccaagttcctgtcccactgtcttttcacttatctgtctcatccatttttcaagtccacctttgtctttaggagagataattatgtccctcacacaatacgctatactgagaatgggctgtggggatgaacaatgtgaaaactgaaaagaggaagaacacatcttaggaaaaaaatcgtcatattttctctaagaaaataaataacttcataaagtttattgtacaggaagacttggatcattcttgaattttcattgcaaatcaaaaacaggaatttgactttattatcttgggagaaataggaatagaaaagtgtataaaaaataaactttttttaaccaagaataaattgcagtaacaggttaagactctgggtgtcgctgttcaccaatcagggggaaaagacaaaccagaaatttaatcagaatcacaagatttctgcagcacaaagcactggctctggagctttatgaaagcttcaagcggaagccctgagagctctggctgtgaatgcactttattttggacccagaagatcctggggctcctcaggcctcgacagagggaaaaccgaagcacaggcgactccgcggcggggttgtaatggcggcgcctcctgctcgcccagaccacacccggctgctccagatctgccttctcctgggggttctggtggaaatcagggccgaacagattctctactcggtgtttgaggagcaggaagaaggctcagtggtgggcaacatcgccaaggacctggggttggcgccccgggagctggcggagcgcggagtccgcatcgtctccagaggtaggacgcagcttttcgccctgaacccgcgcagcggcaccttggtcaccgcgggtaggatagacagggaggagctctgcgacagatctccaaactgtgtgacaaacctggagattcttctagaagatacagtgaagattttgcgggtagaggtggaaataatcgatgttaatgataacccacccagttttgggacagaacagagggaaataaaagttgctgaaaatgaaaatcctggggcaagatttcctcttcctgaagcttttgatccggatgtaggtgtaaactccctgcagggttaccagctcaactcaaacggttacttttccctggacgtgcaaagtggggccgatgggattaagtacccagagctggtgctggaacgcgctctagatcgcgaggaagaggcggttcaccacctcgttctcacggccttcgatggaggtgacccggttcgctctggcactgccaggattctcataatacttgtggataccaacgataatgctcccgtgttcactcagcccgagtaccacgtaagtgttcgtgagaacgttcctgtaggcactcggctactcaccgtaaaagccactgatccagatgaaggagccaatggagacgtgacgtattctttccggaaagtaagagacaaaatatcacagctatttcagttgaattctctgagtggggatataacaatattggggggtctagattatgaggactctggattctatgacatagatgtagaagcccatgatgggcctggtctccgagctagaagcaaggtactggtgacagttctggatgaaaatgacaacgcaccagaagtcacagttacatctctcaccagctcagtccaggaatcttcttccccgggtacagtaattgcacttttcaacgtgcatgacagtgactcaggaggaaatggcctagtcacatgttctattccagataatctgccattcacacttgaaaagacctatggaaattattatcggttgttgacacacagaacactggacagggaagaagtctcagaatataacatcactgtaactgccactgaccagggaactcctccactgtctacagaaactcatatttcactgcaagtgatggacatcaatgacaacccacccactttccctcatgcttcctactctgcttacattcctgaaaacaaccccagaggagcctccatcttatctatgactgctcaagaccctgacagtggtgacaatgcccgaatcacttactccctggccgaagacaccttccagggtgcacctctgtcctcctatgtctccatcaactccaatacagggatcctatatgctctttgctccttcgactatgagcagtttagagacctgcagctgctgatgacagccagtgacagtggagaccctccactcagcagcaatgtgtcactgagcctctttgtgctggaccagaacgacaatgtccctgagatcctgtaccccaccttccctactgatggctccactggtgtggagctggcaccccgctccgcagattccggctacctggtgaccaaagtggtggcagtggacagagactcaggtcagaatgcctggctgtcctacagcctactcaagtccagcgagccgggactatttgcagtggggctgcacacaggcgaggtgcgcaccgcacgggccctgctggacagagacgcgctcaagcagaggcttgtagtggtcgtccaggaccatggccagccccctctctcggccaccgtcacactcactgtggctgtggccgacagcatcccagatgtcctggctgacttgggcagcctcaagccttcagcagacccagacgactcgggcctcacactctatctcgtggtggcagtggccgctgtctcctgcgtcttcctggcttttgtcacggtgctgctagcactcaagctgagacgctggcacaagtcacgcctgcttcacgctgaaggcagcaggttggcaggtgtgcctgcctcgcactttgtgggcgtggacggggttcgggctttcctgcagacctattcccacgaggtctccctcaccgcggactcgcggaagagtcacctgatcttctcccaacccagctatgcagacacgctcatcagccgggagagttgtgagaaaagcgagcctcttctgataactcaggatttacttgaaacaaaaggagaccctaatcttcaggtgagtcaatcttataatagatcataccacactgaaatatagacaaagagttgtgtaaatgtctctcattttatatgtaatatatcaaataaagttgcctcttttaatattttattgctttaaagaaaactggtggatgaccttccaataatgatcaacagtatttaccacacaaaaatgttgtttattacttatcctttttggtcttcattcagttgtagtttcagccagaattttctaattttacaactctgagccacctcatttccttaaatttccttttctgtgctgggtgtggtggctcacacctgtaatcctaacactttgggagtgtgaggaggacggattgcctgagctcaggagttcgagaccagtctgggcaacatggtgaaacccagtctctactaaaatacaaaaagttagctaggcgtggtggtgtgtgcccgtagtcccagctaccctggaggctgaggcatgagaattgcttgaacctgggaggcagaggttgcaatgagctgagatcatgacactgtactccagcctgggcaacagagcaagcctctgtctccaaaaagtaaaataaaataaagtaaaataaagaataaatttccttttctcttaggtgttcctgaaaagatacaagagacctgtaaaatagaaggcaattgtgtaaattcacatttacaatattctttctcatgaagctattgttggatctggactgagggttttttaatttcctattttcacactctaccatgctttgcttgaagtttacttttccttccttgaaagggtattttccattataacaggcaacgtcaatttaagaatactggcaatttgtgagtttaacttttagatataactttaacaggatattttctcaatgaactggtatatttcaaatattttcttgttgctgttctgagatgcaccagaagtgactatgtgtgattcctctggtgcactcctgtgattatgagaaatatttccaagctaatttcagtcatatataagtagattctaggagtaactttaataatttttaaattgcttatcatgacatcactattgagactttcttgatttccaaggaaaatataagtttttggagtcttttctcttgtcatcatgtgagcctctttcaaaggttgagttacttgggttctggactgatatgatttacgctgcttagtaaggtggcctcatccctattgctacaaattgctttcagatatttctgtcatcatgtggctctgggattattttatatgagggaaaatattttgtgtgtaggggatatacaacacttttgttctttgtgctttcatttaggttctgtgagaattcaaaattcatgaatgcatatgcttacacaaattagtgtaatttgataactggaagttgtagtgatagactgtggaatatgcctcaatttgacttacaaaggagagttttagtttctacatggttttgtattcatagaaagttgtggtgcaatacatagagtaagctggaatatgatatgatgcagttacctggcttggggagcagaaagcagaaataacaagtgaatgttgagagacaacttacatctgaggagagattgtttaaagtaattaagccataaaatataatttggaaatgctcaattggtctgaaactgtgtcaagcatattcaggtgttggcattaggaatatattccagaatgagagtgccacatgttttaaaggcctaggaaagcagtagataatttataacctaaaatcaaattttttaaaaaatgtgtttttgttagaatgggcagtgggtttcttttagcaaataacaattttgattaaacaaattgttgtatattcatattacggactactagataactatattatgggccactagataactataagaaataaataggaaagctctctatgtactgatatgatctttaagatataacaactaaaaaagcaatgtgcagaatatggtatgttgtatgcttacatttgtgtaaagaaggagacagaatatttataaaaatccgttgccctatacaagacatatctccggaaggatacctaagaaactttaacactcatttcccctgtgaaagcatttctcctcatctaaagcagagatgaaaggaagaacctatgctgaatgcatcttttgaatttggaactatatgaatatttcacatattttaaaacaaatgaagactttataaattaaaaaagaaaagaaaagaaaaaagttcttagcaaatattgacaagccattagtgcagtttcctgagaaaacctctgagcgtcgctgttggtcaaaagaacgaagagaagcgtttgggagcctcttagaggggaacttcctgcacaaaccaaccacacagagaaggccagtatagattcggaaacagaaaacaaaagcaggaaaagtgaccttagcccggattctgccatccccggaaggcttattcctcctatgggcaaaggagcaaagggagccagaagatgaaagcgagctcagggaggtgcgggctggtgcggtggctgcaggtactgttgcccttcctgttgtctttgttccccggggctctcccagtccagatccgctattcaattccagaggagctggccaaaaactcggtcgtaggaaacctcgccaaggatctggggctcagcgtccgggacttgccagcccggaagctgcgggttagcgcggagaaggaatatttcacagtaaacccagaaagcggagacttacttgtgagtgacagaatagaccgagaacagatatgcgggaagcagcctctgtgtgttctggatttcgatactgtcgctgaaaatccactaaatattttctacatagcagtaattgtgcaggatataaatgataataccccgctattcaaacagactaagattaatttaaaaattggcgaatccactaagccaggtacaacatttccacttgacccagccctggattcagatgttggtcctaactcactacaaagataccaccttaatgacaacgagtactttgatctcgctgagaaacagactccagatggtcgtaaatatcctgagttgattctaaaacactctctggacagagaagagcacagtttacatcaattggtcctcacagctgtggatggcggagacccacctcaaagtggcacgacccaaatccgaatcaaagtcacggatgccaacgataaccctccagtgttcagccaggacgtgtacagggtcaccctgagggaggacgtgccgccgggcttctttgtgcttcaagtgacagccaccgaccgggatgaaggcataaacgcagagatcacctactcctttcataatgtggacgaacaagtgaaacactttttcaacttaaatgaaaaaacaggagaaatcacgacaaaggatgatttggattttgagattgcaagtagttacactctgagtatcgaagcaaaagatcctggagatctagcagcccactgcagtatccaagttgaaattcttgatgacaacgattgtgcacctgaagttattgtgacttcagtatctactcccctaccggaggattcgccaccaggaacagtgatcgccttgataaaaacgagagacagagactctggagaaaatggagaagtttactgccaagtgttgggaaatgccaagtttattttgaaatcttcctcaaagaactattacaaactagtgacagacggcgctctggaccgggaggagatcccagaatacaatctcaccatcacagccaccgacgggggcaagccgcccctctcctccagcataattgtcaccctgcacatctccgacgtcaacgataatgccccagttttccaacagacttcctacatggttcacgtggcagagaacaatcctcctggcgcctctatcgctcaaatcagtgcctctgaccctgacttgggccccagtggccaagtttcctactccatcgtagcgagcgacctgaagccgcgggagattttatcctacgtgtccgtgagcgcgcagagcggggtggtgttcgcgcagcgcgccttcgatcatgagcagctgcgcgccttcgagctcacactgcaggcccgcgaccagggctcgcccgcgctcagcgccaacgtgagcctgcgcgtgttagtgggcgacctcaatgacaatgcgccacgggtgctgtaccccgcgctggggcctgatggctccgccctcttcgatatggtgccacgcgccgcagagcccggctacctggtgaccaaggtggtggcggtggacgcagactcaggacacaacgcttggctgtcctaccacgtgctgcaggccagcgagcccgggctcttcagcctggggttgcgcacgggtgaggtgcgcacagcgcgtgccttgggcgacagggacgcggcccgccagcgcctgctggtcgctgtgcgtgatggaggacagccgccactctccgctacggccacgctgcacctaatcttcgcggatagcctgcaagaggtattgccagacctcagcgaccgccgggagccctctgacccccaggcaaaactgcagttttacctggttgtggccttggccttgatctcagtgctcttcttcctcgcggtgattctggcaatctccctgcgcctgcgactctcttccaggtcagatgcttgggactgttttcagcctggtctcagctccaagcctggacctggggttctccccaattacagtgagggtacattgccctattcctacaacctgtgtgttgcctcacaatcagccaagacagagttcaattttctgaacataaccccggaattggttcccgcgcaagatctcgtctgtgacaatgcctcttgggaacaaaatacaaatcatggagccgctggggtcccttttgcctcagatactattttgaaggtgagctttaattaatttattttcacttctggttttattgtttcacctaatttgggtaggaagttccactgcgtatttctttgtctgtgagttagatttggccaatgttgtgccttaattgtcttaatcttatctaactgaattttaagtgttttctctctgaagtgtgagatttatttacccatgattgcaaacctttatcacatgagatattgcactgtatttctttttcttcctcatctttacattacttctctctgcagatttgttgctattgagactttaggcaattagtttcaccttcaggctctttgttattcaaattttagttttacttcctcttagaatcataatacttcagagtaaagagagtcttcattttagtaggctttggaaattgggaaacaaagaagaaagacttttgcataatggcatggcttgttaatcacagggcatgggtaggacattgtcccattgacttgaagaccaacactcagtaagctaaatgtcttggaatcacaaatgtatttctaaaggacaggcaatgtttgaggtctgaggtgtctgctagaaagagtgcatttaacaaatgtgagaaatcattctctaacatgcattttaacaaattgctcttaagaaaaactacacattgagaaaaatcttacaacctatgttcacatcattttctacaaaatattacttaaaactttgcttttgaatttcctaattatatagaatttttattttcttagttttctatgaaagtgttattaaataaaatgactttctgaaatgtccatttttttcaatcaagaggtttttctatttctgttgtcatataaagatgatagcagtaaatatctgtctcaacatagaaaggtcactcagtacttctcgacaagtatctgctcatgctttcctgcatggatgatgaaataaaaccccatcctccacagttactatactggttgtcactggaactacaaatatttgaacatggtaatagaaaaacataaaaatgcatagttaacccaactcaaacgctgtctgagatagtggagagactttctcaaagtcctcacaagtaacaaagatctttatttcttctgcatatgacagctaatataacttacataaatcagtaggcctgtttggaaaggtgcatggagaactgggtttgtttccttggtattcttatatgcaaataagcacgttttcctaaatttatcctaataaggagatgaaatcttgaatcctacaaaggtaagaatttgaatgtcctaatttaatggactaaatatagataagaggtaaataaaggacataggctcccccgatgacgcattaaataaaatttttgtaaggtattgagatctaataatcatattgatctcagggattgtggaagtcttgctattcagaattaaagctgaattaacggtcataaacaacgctacacagttaaacattaaggatatggcaacattattagaaataaaattataactaaacttaggagaaataaaaatggaatttgatgcagtcactggttaggactctgagtgtcgctgttgaccaaagtgggaaagaagctgccgcagaggcgacccgactctgctccctccatactaaacacacagaccagacaagctcctacgaaaagccaacgctccacgcccattttcgtcagggaatatgtacccatcggctttagataaataaggaaacagcaggctgaaccagaactaagagaaaattgggcagagagaaggcaatggcgagtccacctaggggctggggctgcggagagctgctgctgcccttcatgctcctggggacgctgtgcgagccaggatccgggcagatccgctactcgatgccggaggagctggacaaaggctccttcgtcggcaacatagccaaggaccttgggctggagccccaggagctggcggagcgcggagtccgcatcgtctccagaggtaggacgcagctttttgccctgaacccgcgaagcggcagcttggtcaccgcgggcaggatagaccgggaggagctctgcgctcagagcccactgtgtgtggtgaactttaacatcttggttgagaacaaaatgaaaatttatggagtagaagtagaaataatcgatattaatgataacttcccgcgtttccgggatgaagagttaaaagtaaaagttaatgaaaatgcggctgcagggacacggttagtgcttcccttcgcgcgggatgcggatgtgggtgtgaactctctccggagttaccagctcagctccaatctgcacttctctctggatgtggtaagcggaactgatggacaaaagtatccggagctggtgttggaacagcccctagaccgcgagaaagagactgttcacgacctcctcctcacagctttagatggcggagacccggtactctccggcaccacgcacatccgtgttacggtcctcgacgcaaacgacaatgcgcccctgttcaccccatccgagtacagcgtgagtgttccagagaacatacctgtgggcactcggctgctcatgctaaccgccacggatccagatgagggaataaacgggaaattgacctactcttttcgcaatgaagaagaaaaaatttcggagactttccaacttgattccaacctgggggaaatctcaactctacaatcactggactatgaagaatccagattctacctcatggaagtggtagctcaggatggaggcgctcttgttgccagcgctaaggtggtggtcacagtacaggacgtgaatgacaatgcccccgaagtgatcctcacctctctgaccagttcgatctctgaagactgtcttcccggaactgtaatcgcgctgtttagcgtacatgatggtgattctggagaaaatggtgagattgcatgctctattcctaggaatttgccttttaaattggagaagtcagttgataattactatcacctattaacaactagggacctggacagagaagagacttcagattataatatcactttaaccgtcatggaccatggaaccccgcccctctctacagaaagccacatccccttgaaagtagcagacgttaatgacaacccacccaatttccctcaagcctcctactccacctctgtcacagaaaacaatcccagaggtgtctctatcttctctgtgacagcccatgaccccgacagcggcgacaacgctcgagtcacctactccctggctgaagacacatttcagggggcgcccttgtcctcctatgtatccattaactctgacaccggtgtcctgtatgctctgagatccttcgactatgagcagttgagagacctacagttgtgggtgacagccagcgacagtgggaaccctccacttagcagcaacgtgtcgctgagcctgtttgtgctggaccagaacgacaatacgcctgagatcctgtaccccgccctccccacagacggttccacgggcgtggagctggcgcctcgctccgcagaacctggctacctggtgaccaaggtggtagcggtggacaaagattcaggccagaacgcctggctgtcctaccgcctgcttaaggccagcgagccaggactctttgcggttgggctgcacacgggcgaggtgcgcacagcgcgagccctgctggacagagacgcgctcaagcagagcctcgtggtggccgtcgaagaccatggccagccccctctgtcagccaccttcacggtcaccgttgccgtggccgacaggatccctgacatcctggctgacctaggcagtatcaagacccccattgaccctgaggatctggacctcacactctatcttgtggtggcagtggctgcagtctcctgcgtcttcctggccttcgtcatcgtgctgctggtgctcagactgaggcgctggcacaagtcacgcctgcttcaggctgaaggcagcaggttggcgggtgtgcccgcctcgcactttgtgggcgtggatggggttcgggctttcctgcagacctattcccacgaggtctccctcaccgcggactcgaggaagagtcacctgatctttccccagcccaactacgcagacacgctccttagtgaagagagctgtgagaaaagcgagcctcttctgatgtctgataaggtagatgcaaacaaagaagaacggcgagttcaggttagttttctctttcggtaaggatgaccagaacattttcatttgtttcctttttcatgtttctgtcatattcagaatcagctagttatgtaaatagtggaacattatttgctgtattggagattaattttttttatataattcatgctttctccatttgttttcaaattctgttttgggaagtctagctgatatctgtagacttaagtgaaacaaataccttaaaggaaagtggttaaatataatcattttacccaaatattttgttatattggaactgcagttctattaatagaaaagatgttttatttattcaaattgttagatatattgttctcttttgagtgtctgcctagacaccattagtgaatgtgttttggaaaggataatgtataggactgatattttagtctacctgaaatttgtttaaggaaataatttacagtatttacataaatcagtggaaaggtacagagaacttctgggtcataaatatcagaaaagaggccgggtgcggtggctgacgcctgtaatcccagcactttgggaggctgaggtgggcggatcacgaggtcaggagatcgagaccatcctggctaacacggtgaaaccctgttctactaaaaatacaaaaaattagccgggcgtggtggcaggcgcctgtagtcccagctactcggaaggctgaggcaggagaatggggtgaacccgggaggaggagcttgcagtaagccgagatcgcgccactgcactccagcctgggagacagaacgagactccgtctcaaaataaataaataaataaataaataaataaataaatatcagaaaagtagataaaatttatattaatgataacatgtagcattctaaagtctggaaagtttgtgttaagccatgtagttattggatatgtgggcttgttgagagaagaaatcagtgtaaaggaaccttaaggttgggcttcgttctgtgatgtaaagcctccagagagttacatactgctgcactcaataaatgtaaatatgtcacacacctggcatcttctgttatagataaaccctttacttattagaatcaatacctactgcaatgttagcgtttctttaagtgtaggtgcaattcttctttattacttgagtttaaggttgtatttgaaaaaaaaagaactcaacttaaagatggttcaaaattttaaatttcatatctaacgtatgtgctcatcttaaattaatagatttgtcttaatgaaatactggcctatgtgcctcaaattccaggaggatgtgttatgtaatgaaagaactactatatttcccttctgcatctgatttgctgaagatgattttcagatgtttcttattaaaatattcttaatccttcaaattttgtacttttaaaaccttgagcatcagcttcaaataatgactaaataaggggaaaaggtaataaaatattacaaatgggatagtaagctacattactcaaccacatgaaaggttaattgacacattaaagaacctaagaccacttgatttttattttttaaacactgttaaagagcattcaagtatatctatatctatatacatatacacacacatatatatacacacatatatatacacacatacacacacacaaacacacatacatacacacatggacattctgaccaaaatgtaaaatgtacaaactcaccgaatagtgaatgcatccaaagagtaacaagagaatctatacagtaggtgtcgacattattcactcctatgtgaaaacttgcttttccattttttttaaaagaaaatgttatatgcttcttagggtaaggtgtttgggaaaaaagtaaaggttatagatttgggtacatttcttctgagttaaatgttttgtgcaatggaaaaatatctttaaaccctctataaactactaacagactataaaatgcttgatccatacattttgaatgtatgtactgtatataccatatacttttaaatatctgaatctttagttttatatgtgttctgaagaataatttttcatactaattgaagtgttcatacaatgaacacttggcattgtgttggaaggcacttgctttggaatgttttggagcaaagtcttgagtcagttatatttttgatgtttgtataaaggtgacaatgagtgtctgtctagaattctggttactgtgagtagtttaagatgctataatgcttttccactataaggtgaattcggtgtggaactcattgcttattgctgcacacttgcctagttttagagtaacaatacattatgtaggctaaagataatttctttaggaagattttctggtttgaaaatggaattaaaactgtaagacacctgtcagaaacatggaaaatggcatgttattgaccagggaaaagtgtaaataacaaaaagttaggattatcagatggtaaactggggaccaaggaaaagtggacaggaagattacttatataattaaataatataattataaggacttacaattcactccccaatcctaataacgcatcattgttaggctacttgagaagaaacagtacatttcaggacaattgtgatgtagtatgaaaaaacatcctttgtaaaagtttttcatttgggccagggtggttcatgactataatcccagcaatttgggacgctgaggtgggaggattgcttaaagccaggtgttctagcccagcctgggcaacatagtgaaaccccacctctatagaaaaaaaaagttttcaatcatacttatttaattaaaagtagacacttggaaacaaaggaaaagagaccctcttgctttttactatacttctattttataaggtcaatcatttcctcattacctttaacttcttttggggggagataataaagataaaagagaagaaagtgaaacatagaataaaactaaaagctatgacattataacttttagaagttagaagtaaaggaaatagaatgcaataagaatacacgtgaagctgatatttcaagcctctttatactacgtcttctgccatcaccaaaaatagcttccatttgtatgattttctatgtattattttatttggccctcatttctactagagtaagcagagaagatattattatgaccattttatgaaaatggaaactaaaaacgtgacgggattgagcaagattatctctgccctttgacaagtaaaaggtacttgatttggatggataaagctcaaattaaaagaaataacagactaaagatatagtaagtatatttaatgttttttaaaagtccttttaaaatgggaagaaagtatcactatcagtacactgccgatttttctcctaactagctccttatttggagctgatttagtcaccattactgcagttctgcagcagaggcgccgggtgccgctcttggctagtgctgtgcaaaatattggctcctcccgctgcagccagctcggaagaaaagtgcactctctatcaggcttcctgcagcggagacacccattagagaacccaagcacaaagacaaagcaaatagttggtcctgctcggagaactcttgggattatttaaagatctcctctcctcggatttagaaaggcaaaggcgcagagagcgggatgggaaatagctccggatggaggggcccagcagggcagaggcgaatgctatttctcttcctgctctctttgttagaccaggttctctccgaaccgatccgctacgctattcccgaggagctggacaggggctcgctggtagggaacctcgccaaggacctggggtttggcgtgggggatttacctactaggaacctgcgggttattgcagagaagaaattctttaccgtgagccccgaaaatgggaacttacttgtgagcgaccgtatagaccgagaggagatttgtggcaagaagtcgacgtgtgttctggaatttgaaatggttgctgaaaagcctttaaacttttttcatgtaactgtgctgatccaggatattaacgacaacccaccgacctttagccaaaatatcactgagctggaaatcagcgaactggctctcactggagccacatttgccctggaatctgcgcaagatcctgatgtaggtgtcaattcgctgcagcagtactacctcagccctgatccgcacttctctttgattcagaaggagaacctggatggcagtaggtacccagagctagtactgaaagcacccctggacagggaagagcagccacatcaccacctggtcctcacagctgtggatgggggcgagccctccagaagctgtaccacccagatcagggtaattgtcgcagatgcaaatgataaccccccagtatttactcaggacatgtacagggtcaatgttgcagagaacctgcccgctggctcctccgtattaaaagtgatggccattgacatggatgagggcatcaatgccgaaatcatctatgccttcatcaatattggcaaggaagtgagacaactgttcaagctggacagtaaaacgggggaactcaccactattggagaactggactttgaagagagagatagctacacaattggggtggaagcaaaggatggtggacatcacactgcatattgtaaagtacagatagatatttcagatgaaaatgacaatgccccggagataaccctggcttctgaatcccaacatatacaagaagatgctgagctggggactgccgttgccctgatcaaaacacatgatctagattctggatttaatggagaaatcctatgccaactaaaaggaaacttcccctttaaaatcgttcaagataccaaaaacacatacaggttggtgacagatggagccctggaccgggagcagatcccagaatacaatgtgacgatcacagctaccgacaaaggcaatccaccgctctcctccagcaagaccatcactctgcacatccttgatgtcaacgacaacgttcccgttttccaccaggcctcctacaccgtgcatgtagctgagaacaatccgcctggagcctccattgcgcatgtcagagcctcggatcccgacttgggacctaatggccttgtctcctactacatcgtggccagtgacctggagccgcgggagctgtcgtcctacgtgtccgtgagcgcgcggagcggggtggtgttcgcgcagcgagccttcgaccacgagcagctgcgtgccttcgagctcactctgcaggcccgcgaccagggctcgcctacgctcagcgccaacgtgagcctgcgcgtgttggtggacgaccgcaacgacaatgcaccgctggtgctgtacccagctctggggcccgaaggctctgcgctcttcgatatggtgccgcgctctgcagagcctggctacctggtgaccaaggtggtggcggtggacgcagactcgggatacaacgcctggctgtcctaccacattgtgcaggccagcgagcccgggctgttcagcctgggcctgcgcacgggtgaggtgcgcacggcgcgtaccttgggcgacagggaggccgcccgccagcgcctgctggtcactgtgcgtgatggaggacagcagcctctttcagccaccgtcatgctgcacctaatcttcgcagatagcttgcaagagatacaacctgaccttagcgaccgccccactccctctgaccctcaggcggagctacagtttcacctagtagtggcgttggccttgatctcagtgctcttcctcctcgcggtgattctggcaatctccctgcgcctgcgatgctcctccagacccgccactgagggctactttcagcctggtgtctgcttcaagactgtacctggagttctccccacctacagcgaaaggactttgccttattcctacaatccgtgtgctgcctcacattcctcaaacaccgagtttaaatttctcaatataaaggctgaaaatgctgcaccacaagatcttctatgtgatgaagcctcttggtttgaaagtaatgacaatccagaaatgccttctaattcaggcaatttgcaaaaggtgagtttcttcaaacctttccttccataaatataattgggtttcaattcattgatttagagataaaaagaatacagattaaatattccctgattacattattttattgattttctggtgtagagtagggtgtctaggaaattctttgtagaatttcctgtagaatatctgtgttgcagttgttctttcatagaaagcctccttttgatagtcttgaaacttttcttaatcctaatacactataatctgaaacatttttaatacagtattatctcacactgtcattttcagacatatctatccagaattagacccaaatcctcacaattaagtggtttacttagttttaatgcagtcaatcctaaaatatatgaaacattatgtatatcttaacacatttttaatgtaacctgtatataatatttttacttccctttgcatgtttttaaaagtatacacagatgttgcctatgtcagggcagtttttaacttctatgctaatcaaaagaaataatggcatctaaaatggcaactcttgtaatgggcactgtaatgaattggttcaaaatgtgtttgtgtagcatatgcctgtagtcccagctactcgggaggctgaggtgggaggatcccttgatcccaggaggtagcagctgcaatgagctataattgtgcccctgcactctagcctgggagacagagcgagactttgtctccaaaaaagtgtttgtggttgttggtacccttactgaaaatgggactagcataaatggtggtgaaatgtgatgataattcaaaatttacagaagattgtaatattatttctgttccccaaggtcctaagagatattttcataaaaatgaatggtaaacttcagagaacatttaaaattattcaaaataatctcttacactcttctaaatgcttcattatcttggggagggaaatattatgagtgtcatctctgcagatttagcagaaataaaatcctctgtgtgatagtttcacaaaacgatgcagtattaagttaggactctaagcgtcgctgttgaccaacctgggcaagaaaatcaacggaaactcaagttacatcctccaacaacaaagcaaattagacgggaaagcaggaaagctgtgcagaaattctgacctgaaacgcttcgcatccggtctctgcttgttgaaggaccttcaccgctatttctgagaagagcaaaagtgatgcagatctgttcttcctcttcttaatcccagagaagttcctaataagccagtaatggcgcctccgcagaggcatccgcagcgcagcgagcaggtcctgctcctcacgctcctggggacgctgtggggggccgcggcagcgcagatccgctactctattcccgaggagctggagaaaggctccttcgtaggcaacatcgtcaaggatctgggactggagccccaggagttggcggagcacggagtccgcatcgtctccagaggtaggatgcagcttttctctctgaatccgcgaaacggcagcttggtcaccgcgggtaggatagaccgcgaggagctctgtgctcagagcccgcggtgtctggtgagttttaacatccttgtcgaggataaactgaatctttatcccgtggaagtggaaatagtggacattaatgacaatacaccccgattcttaaaggaagaattggaagtgaaaattctcgaaaacgcagctccatcctctcgttttccactaatggaggtctatgaccctgatgtgggaatgaactcccttcagggatttaagctcagtggtaatagtcacttctcagtggacgtgcaaagcgaagcccatgggcccaagtacccggagctggtgctggagggcacactggaccgggaaggagaagccgtttaccgcctggtccttactgccatggatggcggcgaccctgtccgctcaagcgtcgcccaaattctggtaacagttctagatgtgaatgacaacactccaatgtttactcagcctgtctaccgtgtaagtgttcctgaaaacctgccagtaggcacaccagtgttggcagtgactgccaccgaccaggatgaaggagtccacggggaagtaacttattcctttgtgaagattacagaaaagatctcacaaattttctgtttgaatgttttgactggagaaatttcaacttctgcaaatctagactatgaggactcgagtttttatgagctgggtgttgaagcccgggatgggccaggtcttcgagacagagcgaaagtcttaataactatcttggatgtcaatgataatgtaccagaagtggttgttacatctggaagcagaacaattgctgaaagtgcacctccaggaacagtaatcgccctttttcaagtgttcgatcgagactctggcctgaatggcctggtaacctgttccatcccgagaagtctcccatttgaattggaaaaatcagttggcaattattatcgattagtgacaaatgcagctctagaccgggaagaggtattcttgtacaacatcactgtgacagccacggacaaaggaacaccacctctgtctacagaaacaatcatctctctaaatgtggcagacaccaacgacaacccgcccaccttcccccattcatcctactcagtctatgtccttgaaaacaaccccaggggtgcctccatcttctctgtgaatgcactggaccctgacgtggaccagaacgcccaagtctcctactcactggcagaagacaccctccagggggcgcccctgtcctcctacgtgtccatcaactccgacactgggattctgtacgccctgcgctccttcgactatgagcagttgagagacctacagctgtgggtgacagccagcgacagcggggacccgcctcttagcagcaacgtgtcactgagcctgtttgtgctggaccagaatgacaatgcgcccgagatcctgtaccccgccctccccacagacggttccactggcgtggagctggcgccccgctccgcagagcccggctacctggtgaccaaggtggtggcggtggacagagactcgggccagaacgcctggctgtcctaccgcctgctcaaggccagcgagccaggacttttctcagtgggcctgcacacgggcgaggtgcgcacggcgcgcgccctgctggacagagacgcgctcaagcagagcctagtggtggccgtccaggaccacggccagccccctctctccgccactgtcacgctcaccgtggccgtggccgacaggatccccgacatcctggccgacctgggcagcctcgagccctccgccaaacccaacgattcggacctcactctgtacctggtggtggcggtggccgcggtctcctgcgtcttcctggccttcgtcatcgtgctgctggcgctcagactgcagcgctggcacaagtcacgcctgctgcaggcttcgggaggtggcttagcgagcatgcccggctcgcactttgtgggcgtggaaggggttcgggctttcctgcagacctattcccacgaggtctcactcactgcagactcgcgtaagagtcatctgattttcccccagcccaactatgccgacacgcttatcaaccaggagagctatgagaaaagcgagcctcttctgataactcaggatttacttgaaacgaaaggagaacccaggcaacttcaggtgagtttctttccgcctaagcgggaagagtaatctgatcttcccgcaacccaactaatcagacaggctcatcagctagatcggctgttatagaagcgaacctcttttggtacaggaagattcgtgattttgtaaagtggaagactcccttgttcaggtgagggtatcgtttttttttttttttttttttgagacggagtctcgctctgtcgcccaggccggactgcggactgcagtggcgcaatctcggctcactgcaagctccgcttcccgggttcacgccattctcctgcctcagcctccctagtagctgggactacaggcgcccgccaccgcgcccggctaatttttttgtatttttagtagagacggggtttcaccttgttagccaggatggtctcgatctcctgacctcatgatccacccgcctcggcctcccaaagtgctgggattacaggcgtgagccaccgcgcccggccgagggtatcgtttttattggttgacaggaaaattcaagattgtctttgattagtgcttagttttcttagccctttgcagagagtcacataattctaatgtttttcttttatatcaaaagaatgttctgaagtcttaattttgtgggggaaaataatgcatgtcctagtttttctttacctttctcttcttggcaaactatttgtgtcttggattgagtacatctcgtttcttaggttttttcctactatgtgacatttgtaaggttctttctttttctaatgtgggaaaaaaaataaccttaatttaggtcagtgttaaagatcaagatcttggttttagctagcatggtggttcacgcctgtaatcccacctcttcaggaggctgaggcaggaggatcccttgagaccaggagtttgagaccagcctgggtgactctgtctctaccaaaaagaaaaaaaagtagccagatgtgtggcgtacacctgtagtcccagctactcgagaagctctgataggaggattgcttaagtccaggggtatgaggctgcagtgagatataattgtgtcactgcaccctagcctgggagacagaatgagactttttctctctctctctcaaaaaaaaaaaaagattttgttttttctcagtgttacttgataactataaacgacagacgttcatacaagagatctttcacctttactacttaggaatcaaaaattatttttgaaaagataagaatcattggtaactgcagcaggggacaccagatctttggtgttaaaagacctgaataacattcctgtaactatctgttatttacttgggccagttacaatcgccattatcttccaattaaaattaagatttaaaagacttctcttatcagagataggatccccctctgttgcccagtctggagtaaaaatccacctgtaactgctgcttatagagtgtgtatccagggcaacttgaatctatgttcctgggttgcaatcctaaagcttggctcaaataagctctacttatattattttttaaaacaagactttccttatctatctgactcaaattctaagaaaataattttataactttttttcaaactctaaagcagcatagtgaacacgtatttgttgacatcaccattattataattattgggttgttaacaataactaagcaccgatgctgtgtgcctactacagtgtcttttgcatactgtgtgcctgatagtatttaagagtgaaaatggccgggtgcggtggctcatgcctgtaatcccaacactttgggaggccaaggcaggcatctcacgaagtcaggagttcgagaccagcctgaccaacatggtgaaaccccgtctctactaaaaatacaaaaattagccaggtggggtggcatgggcctgtaatcgcagctactcgggaggctgaggcaggagaatcgcttgaacccatgaggcagaggttgcagtgagccaagatcgtgccactgcactccagtctgggtgacagagcgagactctgtctcaaaaaataataatgataattaataaataaagagtgaacatgaattttaaaacatgctcggtagtgtctgcttacaggacatatctctaaaaatagatgactgactggtgaatgggagaacaaatgttaatgaggttcaaataaaaatttaaatattttagcattttaacccagacaataaggctttcatcatataggaactctttattgaaatatttcaagaaaaaagggattatcatttagaagactgattagtcttatttattatgactgaaatgtgcaaacagaatcattgtttcatgaacagaaaacagcagagtttttgactgtcaatgatgttcgaatagaaaatggatcactaaggagataggagattctgttatcgacagtcttcaaaagtaagttgatggccctggaatgaatggagtacaggggattctctaatttgatgacttgttgaactacattatagtcaagatttttctccagtcatgagttggaagattctacaatctggtggtattatagaatggattggccacttgtgcatctgaatttgttatgaatgtgtaagaaaaaagcaattgagaagataccttgaaaataaatgagaacctcctttgtaacctgactttgtcagtcttcttaaagataacattgagttgatgtgtttttaaataagctgctaagagtaatatgtgtttttctgaaccaatattgtggtatttacatttaaggaattgttatagatttatttatttcaagtttccaaaggtatatacctaaacaagagatctaatcatacacatcttcaaagctcattttcttgtatctttgtgatataatttgataaaataacaattttaaacaacttgaatcttggatattagtctcatgagttagatgggctgttatacatatgattatttcataaactctgaaagtgtgaatgttattttactatactaccaatttgggatgttaaactacatcttgagcatttgttgttatagggaaagctcactaactacttttcatggagatcaggctggtttattttattctcttattacctgtgaccatttcatttaaacaaataaaatatttctctgatggaaaaactaccaacttctactctcacaaaagtcattcactcatgtggactgaccaactgttaaacatcctggcagtcatggaatttgctaagttatggctaaatgaggttctttaatccacctgcaatacagatcattaataataagataggctatctgaggttttgagagttcagtatagaattttgaagcatcaggaaaaaaaactaccaaattattgtcttattcttattttatggtctgtgaaagcctcttttttttttttttttttttttttttttttgtcagagtcttgctctgtctcccaggctggaatgcagtggtgtgatctctgctcactgcaacttcctcctcctgggttcaagcgattctcctgcctcagcctcccaagtagctgggattacaggtgcatgccaccatgcctagctaattttcatacttttagtagagatggggttttaccatgatggccaggctggtctcaaactcctgaccttaagtgatccacccgcctcagcctctcaaagggctgggattacaggcatgagccactgagcccggcctgaaaggcattcatttctgatcaggcttctgttgaggtggcaattgtcaaaggggaaggagtaaaatctcagaggagaaacattggaagatacctatatctttgcttgagaatgaaaatctaaatggaacttcaaagaactgttttgttgtttgttttttagaaaaaaaagtcccaaaaaagaaaagagagaagataatcaattcgatgcccaggaagccaaatagactttacatagaattctttttaatgcaaccaaacaaatggtcaggattcttcccaatatctcagtcaacaataatatacactctttaaactatgaaatgatttcaatttgatacaatgagcttatgttagattttattaaacatatcttggcggtctagtaaagatctttaatatttaattttatgatgttcgataacttagaaaatgtgaatgctagagacaatgaagccatttactccatagggtatgtatgctttgtgttcggagtagtctataatttaatttaactagctcttatttccttttctccaaagaaggtaccaagacactataaattaattgagacttttttaaaacagtagaataagaaacaaatgtgagatgaaactatgaattttgaggcatcaggtaaaaatggatcaagacattgagagctataacctccaaacatgaaagtttgtttgaaaatatctacaagtgcttacattgtttaataatcatacactttgcttgcctcaacaagaagttcaaaagtactattaaacaaatagaatttaactccagtttacagaattcatctataatacctctattagttcctttaaacaaaatttatctactttgtgaatgcaaagataactatggattattttgatagatcaaaacagaatgtccttcaaagtgttccctgtattctggagcaatgccaccagaaagcagaaataggttacttaggagcctcccacaaaacgaagttaagctttcttagtgttagttctggattctcctcctggttccaccaactactctccaggacctagaagaatttacaaaccaagactgtttcttgccaggtctttattccagagcaggtcattctcttttattctgcaactatgtgaaaggagctttcttttctttctgctagcagagggtagcctcggatccatcaataatttagttttactctatcaacatcagtggagagacgagtacctctaaggatcctgtcaggacagtcctgcattttgctcaaatgctgtctagagatccctgttttctcaattacactagaatagagtaggatgaagatttgaattgcatactaggatgaagacttgaattgaattgcataatgaaaagaatcagccaatccattatccagtttcttatgaattcacagcccagtaggatctctgcagatttctgccttctgtagaaaatgggttgcttctatagctgattgctgcagccaagacaaacaacgatttctttctttttttctcacaagactgggagtgagaatatttggattccgacattgttctactactatataatcaataatcaggaacaaggcaaggcaattccctctttctttctttctttctttcttcttcttttttttttttttttttttttggcagagttttgctcttgttgtccaggctggagtgcaatggtgtgatctcggctcaccacaacctccacctcccgggttcaagcgattttcctgcctcagcctcctgagtagctgggattacaggcgcgcgccaccacgcccggataattttgtatttttagtagagacggggtttctccatgttggtcaggctggtctcaagctcccgacctcaggtgatccgcccgcctcggcctcacaaagtgtgggattacaggcgtgagcaacagcacctggccccccctctcattttttaaacggttaaaatgaaggtgttagaccgtctctaaggttctatacaatcaaaaatttattaaaataggtctatatattttacaacaattttgactttctgaatcttgcatcatggtgtctagaacatatgtgttcaattaatactgaattaattaaaatttatatacactgatgtaaatattttctaagtaaaatctttcatatgtatttaaataaaatttacctttttgccttcaataactgattttcccatgtgcaataacgtgtgagtcagtgcccaaaagagtcacttgaaagttgcaaggcaaagcagttttttaaaaattatctaagattatcaaacaccggtccatgaacactgttgcattaattcagtgtcttaaaatggatttttaattatcagggatatctagagcaaagaaatctaacagggaaattttgaaagatgaaacaattttctatgaaatcagtgtattgtgtgcatcaatgtggtgcagtaacttagtaaggactcacagcgccgctgttcaccaaccagggaaaaatggtgcgagagatcccacagaaaccaccgagttttacagcacagagaaacgacagattgcgataagccctcttccaggctgcactaaactcaagcctctatcctgctggattctgagctccccttcctaagacagaggggtccacccggatacacccgcattctgaagcacttcccgagatcggcgcctaagcaagagaagcaggacgactatggcggctcagccgaggggcggggactacagaggattcttcctgctctccatcctcctggggaccccctgggaagcctgggcaggacgtattctctactccgtgtcggaggagacggacaaagggtcctttgtgggagacatcgccaaggacctggggctggagccccgggagctggcggagcgcggagtccgcatcatctccagaggtaggacgcagcttttcgccctgaaccagcgcagcggcagcttggtcactgcgggcaggatagaccgggaagagatctgcgctcagagtgcgcggtgtctggtaaactttaacatcctgatggaagataaaatgaatctttaccctatagacgtggaaataatagatattaatgacaacgttccaagattcttgacggaagaaataaatgtaaaaataatggagaatacagctcctggggttcggtttccgttaagcgaggctggggatccagatgtgggcacgaactccctccagagttaccagctcagccccaatcgccacttctccctggctgtgcaaagtggagacgatgaaactaagtacccggaactggtgctggagcgggtgctggaccgggaggaagagcgggttcaccacctggtcctcacagcctctgatggcggcgacccgccccgatccagcaccgcccacatccaggtgacagtggtggatgtgaatgaccacacgcctgtcttctctctgcctcagtaccaagtaactgtccccgagaatgtgccagtgggtacaagactgctcacggtacatgctatcgacctggacgagggagtcaatggggaagtgacatattcttttcggaaaataactcctaaacttccaaagatgtttcatctgaactcgcttacaggagaaatatcaactttagaaggattagattatgaagaaactgccttctatgaaatggaggttcaggctcaagatggtcctggtagtctgacaaaggcaaaagtactgatcacagttttagatgtaaatgataatgctccagaagtgactatgacgtctttaagtagctcaatccctgaagacacacctcttgggacagtcattgctcttttctacctacaagacagagattctggaaagaatggtgaggtgacctgcaccattccagaaaacctaccttttaaattagaaaaatcaatagataattattatagattggtcacaaccaaaaacttggaccgggaaacactctctttgtataacatcacactgaaagccacagatggtggaactcctcccttgtccagggaaactcacatattcatgcaggtggcagacaccaacgataacccacccaccttcccccactcatcctactcagtctacatcgctgagaacaaccccagaggggcctccattttcttagtgactgcacaggaccacgacagtgaggataatgcccagatcacttattccttggccgaagacaccatccagggggctccagtgtcctcctatgtctccataaactctgacactggagtcctgtacgcgctgcaatcctttgattatgagcagttgagagaactacaactaagagtgactgcacatgacagcggggacccgcctctcagcagcaacatgtcactgagcctgttcgtgctggaccagaatgacaacccgcccgagatcctgtacccggccctccccacagatggttctactggcatggagctggcaccccgctccgcagagcccggctacctggtgaccaaggtggtggcggtggacaaagattcaggccagaacgcctggctgtcatacctcctgcttaaggccagcgagccaggactctttgcggttgggctgtacacgggcgaggtgcgcacggctcgggccctgctggacagagatgccctcaagcagagcctcgtggtggccgtccaggaccacggtcagcctcctctgtcagccaccgtcacactcaccgtggctgtggctgacagcatccccgaagtcttggccgacctgggcagccttgagccctccgacggtccttacaactatgacctcacgttgtacctggtggtggcggtggccacagtctcctgcgtcttcctagccttcgtcctcgtactgctggcgctcaggctgcggcgctggcacaagtcacgcctgctgcaggcttcagaaggtggcttggcgaacgtgcccacctcgcactttgtgggcatggacggggtgcaggctttcctgcagacctattcccatgaggtctccctcaccgcggactctcggaagagtcacctgatcttcccccagcccaactatgtagacatgctcatcagccaggagagctgtgagaaaaatgattctttgctaacatccgtagattttcaggaatgtaaagaaaacctgccaagtattcaggtgagcccagcccttcctttatttccatgaggaatttatttgcatgatatttctctattattttgcaaaacaaatgttttgaaaatagggatttaaaaaactttatagaggtaaaaatgagtttaccagtttccttcagtggtgacactttaatatagaacacataggatatagtatttctttagtgaaagcctatggacaagattatgaatatgtggactatcacattttataatttccacctactttccaatctatgttccaacctactttcttaactcatatattttatacattggaatgaatcgagtctttcatattgcacaaggttagcaggaataaaacacacctcagctgtcttctcaggattctctttagcattcaaatatgtaaaaggttctgaaagatttcttccatgtgaagatttttttctgtggctgattctgcctccatgtacctcagcttggtggtcctaaaaaatcttgattgcttcttgacctatttacagtataatcatttattaatggggtggtagtagaaggttggatttatgcctaaagaatgaaatgtgtgtgtatcacacttcactaagatctatatcaaagacagacatcaagtctaatgccacactaaaggccatcggacaaaaccaataaaatatgtcaaataaaatgtcattttaagtgttgtaattggcatttgtgacataggcaattacatgttttaacagagaattccagtatgttgttttagtggtacagccagatgaagtgtgtctgtgggctatcaaagtgggagattggggatactggctttgtttcaactgtctcacgtactcaaaccttagaccatcttatgtacacagatcctagaccagtagttgattttatttattaggtctactgaaaaattcagttggaaataacccaatctgggattaactacttccatattcttttgtataacattttagtaaagctcagtatatcaagtgattgtcatccagaaggggtggatgacaaggtaatcttgattccagagacctttgagtattaattaaaaacacacttttagccaggtatggtgttgcaagctgtagcccacctgcatgggaggctgaggcaagaggacagcttgaacccaagaattggaggcccacctagataatataacaagactctgtctcttcaaaaaaagactctttttagactagtgttgtatttggtagtattttgcacatgatagactctgtacaatagtgtgggggatacattttttttttttgacatggagtctcgctctgtcacccaggctggatacattttacaagttctgcagtgttcacatttcagatgtacaatcacttggggtagaagacaatgttgctgacaccaacaatgttactgagggaagatcctatggcagaactacggttataaggtattttgtaaaagaaaatctcctgaccaaaatttattagatgcataaaattgtttttaagcaatggagagacataatcactaaactcagtgagctattgcaatcaaactttccagggattgtttccttcaattcagaggtcaccaaggaatgtaaaataagtgcagaggtaggaagcagtgcttcagtgcagcagatctcagtgactttgtgttttgaggctatgtattatccccctgataactttgaagatgaatgttgtatttcataaccagtaaaataattgtgtaatgaggagaggagtaggctactgcctgtgatcatcgaaatgagaatcacataatattcctgtaatgaaatcactgaaactattgggaagggggtgtatttgaagataagtataaattgcaccttctaaaaggcaattttggtattactgatactctccggaaaaagttgaaataaatcaacttggaggtacttagaaaagtggagaaaatgttaggaacaatgaaagaaagataaaatgtatccagtatatttctaatgagtaagtatggaaaattactgtactctgagacggtttaggccaagtctgtgttatggctatctttatatagatagtgcatgtttgaagattggggaaagcttatgtcaataaatgtttatgtacttaatctacatgatttgcctaaaaatcctcaaagttgggatgaaggcattcctaagagtacatttttagacgtcattaaatatacagacgtatccacgtagtttttgttctttcagttaggcacacaattataattattgcactggttaacttgaagcagcagaggctgtagtttcctagtgctgactctgggcgccgctgttggccaaagtggagagcttggcgctccagatctcctcgcgcagccgcagcgcgctttccagggcagccccagctcagactccccagcgccagcctttacaccgcttcctcctcggaaaaagaagaattttttcttgaactggaactgcaactaaagtccgttcggagatccaaaaatctgcaatacagaggttatttgtaacccggcgtctccaggctggtgagcaagctgaggagagcaagagggatggggagcggcgccggggagctgggccgggctgagaggctgccagtgctctttctcttcctgctgtctttgttctgcccggcgctctgtgagcagatccgctacaggattcccgaggaaatgcccaagggctccgtagtggggaacctcgccacggacctggggttcagcgtccaggagttaccgactcgaaaactgcgcgtcagttcggagaagccttacttcaccgtgagcgcagagagcggggagttgcttgtgagcagcaggctagacagggaggagatatgcgggaagaagccagcttgtgctctggaatttgaggctgttgctgaaaatccactgaacttttatcacgtgaatgtggagatcgaggacattaatgaccacacgccaaaattcacgcaaaattcctttgagctgcaaataagtgagtctgcacagcctggcacacgatttatattaggatctgcccatgatgcggatattggtagcaacacactgcagaattaccaactcagtcccagtgatcatttctcactgataaataaagagaaatcagatggcagtaaataccctgagatggtattgaagacacctttggacagagaaaagcagaaatcctaccacttgactttgactgccttggactttggagctccacccctaagcagcactgcacagatacacgttctagtgactgatgccaatgataatgctccagtgttcagtcaagacgtatacagggtgagcctttcagaaaacgtgtacccggggaccacggtgctacaggtgactgccacggaccaggatgagggtgtcaatgccgagattactttctctttcagtgaagctagccagatcacccaatttgacctgaactctaacaccggggaaattactgttttaaatacattagattttgaagaagtcaaagaatattccatagttttggaagcaagggacggtggaggaatgattgcgcaatgcacagtggaggtagaagtcatagatgaaaatgacaacgccccagaagtgatattccagtctctacccaacctaattatggaggacgccgagctgggaacacatattgctttgctcaaagtccgtgacaaggattccagacacaatggagaagtgacttgtaaattggaaggtgatgttccatttaaaatattaacttcttcaagaaacacgtataaattagtgacagatgctgttctagaccgcgagcagaatccagagtacaatataaccgttacggcaacagatcggggcaagcctcccctctcctccagttccagcatcaccctgcacattggtgatgtaaatgacaacgctccggttttctcacagtcttcctatatagtccacgtggccgagaacaacccgcctggagcctctatttcacaagtcagggcttctgatccggacttggggcccaacggccaagtctcttactgcatcatggccagtgacctggagcagcgggagctgtcatcctacgtgtccataagcgcggagagcggggtggtgttcgcgcagcgcgccttcgaccacgagcagctgcgcgccttcgaactcacactgcaggcccgcgaccagggctcgccagcgctcagcgcgaacgtgagcctgcgcgtgttagtggacgaccgcaacgacaatgcgccacgggtgctgtaccccgcgctgggtcccgacggctctgcgctcttcgatatggtgccgcacgctgcagagcctggctacttggtgaccaaggtagtggcggtggacgcagactcaggacacaacgcctggctgtcctaccacgtgctgcaggctagcgagcccgggctcttcagcctggggctgcgcacgggcgaagtgcgcacagcgcgtgccttaggcgacagggacgccgtccgccagcgccttctggtcgccgtgcgtgacggtggacagccaccactctcggccactgccacgttgcacctggtcttcgccgacagcttgcaggaggtgctgccggatatcactgaccgccccgacccctctgacctccaggctgagctgcagttttacctagtggtggccttggccttgatctcagtgctcttcctcgtggccatgattctggccattgccttgcgcctgcgacgctcctccagccccgcctcctggagctgcttccagcctggtctctgtgttaaatccgaatccgtggttccccccaactacagcgaggggactttgccttattcctacaatctatgtgttgcacatacaggaaagacggagtttaatttcctaaaatgtagtgagcagttgagttcaggacaagacatactttgcggtgattcatctggggccttatttccactttgtaattccagtgaattgacttcccatcaggtgagtttcctttaagtataatttaatgctcattgcctacccatttctccatattcacaagaaaatatacatatttgcaggaaaatatataatttttagatgtcatggatcattttaggaaagttgtagtcagttaaaaagctgtcatatcattctacaaaggaggagtaaagtaggagcaattgtgtggcccaacatttgtttgttttttagccaagcttagatttataaagcaatgagggtgtggttttaaccacaaagtgaaagtgttagacagttgttggctctctcctaaaaagtgaatgagatttttcctatacattttccttcttgttgactaatatatgatgaatacttttttcagcttggatataccataaatataaaaataataaagccaaagaatttaagctaaaattcaacacttttcttaactaatttaactggtatggtctccatagtagtccactgttttgtttcctgtgttaacttcccttttgtttcaaaagctcttagaataaggagtcaactggatttttatgtccatggaccccttgtgattatatgcagtgtacgctgtgtgtgcgtgtgtgtgtgtgtgtgtgtgagagagatccttttacttagaaaaaggtctactatgctcattagaagatcaaaagcagattctccttacttgtaacataggagtttcaggattaatctgtattcaagctcattctatatccttcatcaaagaaaagacaatgttttgtgtctgttgtccctctcacacacagccctaatatataatgtgtaactgccttatctgcagccctaaactaatatagctagaggtcttctaatcattctcctacctctaggaaagaaatatagtcttgaaaactgccaatctggtgtgcatacaaaatatatacaaaataccaaggaacattatatgagccttttgctaggtatatctaagcaactgcttcagttaatggccactttacaaattgctgaaagaaggaaacgtctttcgattcttttttttttctttttttttttttgagacagagtctctgtctgttactcaggctgtagtgcagtggcacaatgatagctccctccagcctcaaactcctgggctcaagcattccttctgcatcagcctcctgactagctggaactcaggctcatgccaccagacctggctaatttttctgttttcagtagagaaaatattttctttcactaatttaactggtatggtttccattgtctacccagttttccatatgcataagaaaatatattcacaggaaaatataaagttttcagatttcatgagtggttttaagaaagttttagtcagtgaaaaaactatcataccagtcttcaaaggaagggtgaaataagttcatctgctacgttgcccaggctggtcttgaagggaaacagacttttttgtagtcatacttatcctttggcttcttagtaagtattatatagtcattactttttgcagttttttagatcaaagtgttaatgtaggtaaagttaattttagaatatatgtaaaagtcaagtctgctttaaatttaatcatctctttggtgaaagggatgggatggagctttgctttttatcatatattcatctgtacctttcaagtattcaaatagaaaaatataaacaatgtaaataaaatagcaaaacaatgtaatatctcataaaactgcaatggtaaaagcatttatcctattgaaattccacaatttttatttgaaaatattatcgacatgtaattcaagtggcatttagaagaataatttaaaagcaacaactctatagaaagcttgtaaaatgattaagtagtttaaaccaaataaaacaatttctgagtcagtcatctccagtaggtctattttagtctcaagataaattcatttctggtgacaactgaagttcttagttatttgttagtatatattggagacatttacaataaagcttagagcacaatgggaaatgaaagtatcatgttttttttaagaccaaatgtattgcagaaatgtgagtaatttaatccgatgctacaatctgatcattctgatctaatctgatcatttaataacactaaataaaaccttcatctcacattctttggctgtttcttttaaaatatgggtttacggataaatcaaataaattcaaaacaaagtaataagcaaatgatttttttttctcagtaatctagtagagtattacatttagaagtaatctgtatctcagtgcagtaactatttaggactgtaagcgccgctgttcacctactggaagacaaatgcaaccgaaaacactcagatctcacacctcacgaagacccgcagatgccacaaactaactgctggactgcagcgaaacccgacccctgtttggaggcactccaggtttccggaggattgtcatctccatagctgcggcaagaaactaaataagacccatttatgcacagtgaagattctgagaggattctgcagcaaaacaacaatggccgctccacagagtcgccccagacgcggcgagctgatcctgctgtgcgcgctgctgggaacgctgtgggaaatcgggaggggacagattcgctactctgtgccagaagagacggacaaaggctccttcgtgggtaatatctccaaggacctggggctggacccccggaagctggcgaagcacggagtccgtatcgtctccagaggtaggacgcagctctttgctctgaacccgcgcagcggcagcttgatcaccgcgggcaggatagatcgggaggagctctgcgctcagagcccgcggtgtctgataaatattaacaccctggttgaggataaaggaaaactctttggggtagaaatagaaataattgatattaacgataataacccaaaattccaggtcgaagatctagaagtaaaaattaacgaaatcgcggttcctggagcacgttatccactcccagaagctgttgacccggatgtgggcgtgaactccctccagagctaccagctcagccccaatcaccacttctccctggacgtgcagactggagacaatggagccataaacccagagctggtgctggagcgcgccctggacagggaggaagaggctgctcaccacctggtcctcacggcctcggatggcggcaagccgcctcgctctagcacagtgcgcatccacgtgacagtgttggatacaaatgacaatgccccggtttttcctcacccgatttaccgagtgaaagtccttgagaacatgcccccaggcacgcggctgcttactgtaacagccagcgacccggatgagggaatcaacggaaaagtggcatacaaattccggaaaattaatgaaaaacaaactccgttattccagcttaatgaaaatactggggaaatatcaatagcaaaaagtctagattatgaagaatgttcattttatgaaatggaaatacaagccgaagatgtgggggcacttctggggaggaccaaattgctcatttcggtggaagatgtaaatgacaatagaccagaagtgatcattacgtctttgtttagcccagtgttagaaaattctcttcccgggacagtaattgccttcttgagtgtgcatgaccaagactctggaaagaatggtcaagttgtctgttacacacgtgataatttaccttttaaattagaaaagtcaataggtaattattatagattagtgacaaggaaatatttggaccgagaaaatgtctctatctacaatatcacagtgatggcctcagatctaggaacaccacctctgtccactgaaactcaaatcgctctgcacgtggcagacattaacgacaaccctcctactttccctcatgcctcctactcagcgtatatcctagagaacaacctgagaggagcctccatcttttccttgactgcacacgaccccgacagccaggagaatgcccaggtcacttactctgtgaccgaggacacgctgcagggggcgcccctgtcctcgtatatctccatcaactctgacaccggtgtcctgtatgcgctgcaatctttcgactatgagcagatccgagacctgcagctactggtaacagccagcgacagcggggacccgcccctcagcagcaacatgtcactgagcctgttcgtgctggaccagaatgacaacgcgcccgagatcctgtaccccgccctccccacagacggttccactggcgtggagctggcgccccgctccgcagagcgtggctacctggtgaccaaggtggtggcggtggacagagactcgggccagaacgcctggctgtcctaccgcctgctcaaggccagcgagccgggactcttctcggtgggtctgcacacgggcgaggtgcgcacggcgcgagccctgctggacagagatgcgctcaagcagagcctcgtggtggccgtccaggaccatggccagccccctctctccgccactgtcacgctcaccgtagccgtggctgacagcatccccgaagtcctgaccgagttgggcagtctgaagccttcggtcgacccgaacgattcgagccttacactctatctcgtggtggcagtggctgccatctcctgtgtcttcctcgcctttgtcgctgtgcttctggggctcaggctgaggcgctggcacaagtcacgcctgctccaggattccggtggcagattggtaggcgtgcctgcctcacattttgtgggtgttgaggaggtacaggctttcctgcagacctattcccaggaagtctccctcaccgccgactcgcggaagagtcacctgatctttccccagcccaactacgcagacatgctcatcagtcaggagggctgtgagaaaaatgattctttgttaacatccgtagattttcatgaatataagaatgaagctgatcatggtcaggtgagtttagttctttgcttgcttttaatttccagatgaattttatttggcataaattatgttttgaaaaacattgtgaagatagttgaaaataatttttaaggtgtatcacagagttttgggtttattttggtggtgttactataaaattgaactctaatagtcataggttattgtttcatttgcttttaaacgacttggaaaagattgttcaaccattttaagccttccagtattttattcctattatcactcattcacttaagaagtagctacccgtccatactggtaattttgctattgtttgtgtgtgtgtgtgtgtgtgtgtgtgtgtgtgtgtgtgtgtgtgtgtgtatcccaaactagaacttcagaaaattatcaagaagtctaaagccttgttattagcttagcaaaagtaaaatatatctcagaatttttagggttatgtttagcatttgaacctgtaactaggctcttgtagatttcttcactttaaacctcttttctgagccctgtttctgtaccagtgcccttcaaaactttaatacttcttaccatccttcaaaacatgaacaaactttaaagatggatcttggtgggagatgagactggttactaaatattaagtatgtgagtcagtggtcacctgggctccatgcccatggagacatgaaatctaaagcctagaatgtccattgctcccccaaacaaaaaacaaaagcaaaaacattagatctgaattaaaatgtaattttaaactgttgaaagtgacttttgtaaaatatgtaagaacatatttcaatacaattccaattagctgtttcggttgtgcattgatgtgaagtggtgagaatgttgatattaagaaccaatgtttcaggtacacaagttctaaataagctgatcaattcaattaaagttattcagtcttggctggacacagtgcctcatgtctgaaatcccagcactttgggaggctggggcaggaggaccgcttgagccccgggggtttgaaactgcagtgagctatgatcatgccactgcactccagcctaggtggcagaactagaccctgtctctaaaaaaactattattaggccgggtgcggtggctcacgcctgtaatcccagcactttgggagactgaggtgggtggatcacctgaggtcaggagttcaagatcagcctggcaaacatggtgaaaccccgtctctactaaaaactacaaaaattagccaggcatggtggcatgcgcctgtggtcccagctactcgggaggctgaggcagaagaatcacttgaacccgggaggtggaggttgcagtgagcctcgatcctgtcactgcactccagcctgggcaacagggtgagactccgtctcaaaaaaaaaaaaaactaatattaatagtaaaaactcggtataggctatccattattgtattcctgcataccttcttgtagcatttgaataaagctaatacctgaattgattgttgtaaggtagaagtagatgacccaataaatgtttgttattaatgaaaaggacatttcctaaggattgtgtagtgttctactgtatggtgcatattcagtggagtgggagttaacttcatagtttgtgtaccatttggatgcacatttgagaggacaacatattattggcactttgcaattttaaaaactcggatgaaagttgccctggtaggaaagaaaatccttactctccctaaaaatgttggctagttgtttttattaatctgacaaatggactaaagaaggttgaccaatgtccacaaatttatgtaaatgaacttatgagcttcatttatccaattccaaagtcatttcagataggataataatgcaatccactagaatatccctttgtaccttgtattgcagaatagataagcatttccccaataactcttaagaatgaatttatgtactgtaaaagatatgacataagagaagtattttgagatatgaagaagagcaacgtagtagggtatatcatttcttagctacatcatatgggcagtatacttgaatgaatatttcctgaagtagaagagtaaagaaaaattatttttataaagaatgttaatatagtcaggaagaggagatgtttggggattggtataaaattgccacaactttacaaaatagttttaaatagtatagatttccctaatatgtgtaatataaaacactagaaatattggggagttggaaatcatagaaatgaacagaagaatgataaaattgtttccatagctaataaaaaatgaatttttgaaatcagtatagtatgaaggctctgagagcaagaactgtatcatattaattattatattgccagtgacaagggcaatacttagttctagctaagagttcaaggtatgtttgcagaatggtgaaagaatggaccaatgtatgcaggtttgtataaaaacccaacgtgatatttctaacaatttggaaaacagagaaagataccttaaagaagttgttataattttttattaagtatatggacgtaaaaacttggcttgttaagttaggcacacaaaaacaattactgcactggttaacttgaagccgcagaggctgtagtttcctagtgctgactctgggcgccgctgttggccaaagtgcagagcttggcgctccagatctcctcgcgcagccgcagcgcgctttccagggcagccccagctcagactccccagcgccggcctttacaccgcttcctcctcggaaaaagaatcgtttcctaaactggaactggaactaaagcccgttcggagatccaaaaatctacaatacagaggttatttgtaacctggcgtctccaggctggtgagcaagctgaggagagcaagagggatggggagcggcgccggggagctgggccgggctgagaggctgccagtgctctttctcttcctgctgtctttgttctgcccggcgctctgtgagcagatccgctacaggattcccgaggaaatgcccaagggctccgtagtggggaacctcgccacggacctggggttcagcgtccaggagttaccgactcgaaaactgcgcgtcagttcggagaagccttacttcaccgtgagcgcagagagcggggagttgcttgtgagcagcaggctagacagggaggagatatgcgggaagaagccagcttgtgctctggaatttgaggctgttgctgaaaatccactgaacttttatcacgtgaatgtggagatcgaggacattaatgaccacacgccaaaattcacgcaaaattcctttgagctgcaaataagtgagtctgcacagcctggcacaagatttatactagaagtagcagaagatgcagatattggcttaaactctctgcagaagtataaactctctcttaacccaagtttctcattaataattaaggagaaacaggatggtagtaaatacccggaactggcactggagaaaaccttagaccgggaacaacagagttaccatcgtttagtcctgactgccttggacggtggacatccacccctaagcggcaccactgagctccggatccaggtaaccgacgccaatgataatcccccggtattcaaccgagacgtgtacagagtcagccttcgggaaaacgtgccaccaggcaccactgtgttgcaagtgtcagccactgaccaagacgagggcatcaactcagaaattacttattccttctacagaaccgggcaaatctttagtctgaattcaaagagcggagaaattaccactcaaaagaaactggattttgaagagaccaaggaatattcaatggttgtagaagggagggatggtggtggactggttgcacaatgtacagttgaaattaatattcaagatgaaaatgacaatagcccagaagttacattccattctctacttgaaatgattctggaaaacgcggtgcctggaacactaattgctttgatcaaaatacatgaccaagattctggggaaaatggggaggttaattgtcaattacaaggcgaagtcccttttaagattatctcttcatccaaaaattcgtataagttggtaacagatggaaccctagaccgagagcaaaccccggagtacaatgtcaccatcacagccacagacaggggcaagccgcccctctcctccagcataagcgtcatcctacatatcagagacgtcaacgataacgctccggttttccaccaggcgtcctacttagtcagtgtacccgaaaacaaccctcctggggcctccatcgcgcaagtctgcgcctcggacctggacttggggttgaacggccaagtctcctactctatcatggccagcgacctagagcctctggcactggcctcttacgtgtccatgagcgcgcaaagtggggtggtgttcgcgcagcgcgcctttgactacgagcagctgcgcaccttcgaactcacactacaggcccgcgaccagggctcgcctgcgctcagcgcaaacgtgagcctgcgcgtgttggtgggcgaccgaaacgacaacgcaccgcgggtgctgtaccccgcgctgggtcccgacggctctgcgctcttcgatatggtgccgcgcgctgcagagcccggctacctggtgaccaaggtagtggccgtggacgcagactcaggacacaacgcctggctgtcctaccacgtgctgcaggctagcgagcccgggctcttcagcctggggctgcgcacaggagaggtgcgcacagcgcgtgccttgggcgacagggacgcggcccgccagcgcctgctggttgctgtgcgtgatggtggacagccgccactctccgccaccgccacgctgcacttggtctttgctgacagcttgcaggaggtgctgccggatatcactgaccgccctgtaccctctgacccccaggctgagctgcagttttacctagtggtggccttggccttgatctcagtgctcttcctcctggccgtgattctggccgttgccttgcgcctgcgacgctcctccagccctgccgcctggagctgcttccaacctggtctctgtgtcaagtctggacctgtggttccccccaactacagtcaggggactttgccttattcctacaacctatgtgttgcacatacaggaaagacggagtttaatttcctaaaatgtagtgagcaattgagttcaggacaagacatactttgtggtgattcatctggggccttatttccactttgtaattccagcgagtcgacttcccatcctgagttggtgagtttcatttatgtctattctttttcattacccacccaattttctgtatttacatgaaactatcgtacattttcaagtccaatgagttgtcttagggaagtcagagctgctcagaaagctgtcctaccattctttaagaggagcagtaaattgtgagtttttatgtcgcataaaagaagtagccttatagatttacaaagtagtgagagtttgctcttagcttcctctctagcaaaaacatttggtgcgtttttttgtcctctttctcaaagctaatgaattttacctattcgttgtctcattctttaacatgtttatattttattgtatgtagataaaccattaaatttaatgtatgtaatcatttaattcatcttttaaagcaaagaaactgctagtagatgtctttcttcactgatttcactggtagttttcatctctttcttatgttcctcatatatgctttcttattcctacctaatggatttatgattttttgaatctcctaaaattttattaaaaatactatatgttggctgggtgcagtggctcatgcctgtaatcccagcactttgggaggccgaggcggttggatcacatggtcaggagttcaagaccagcctgggcaatatggtgaaaacccgtctctactaaaaatacaaaaattagctgggtgtggtggcgggcgcctgtaatcccagctactcaggaggctaagacaggagaattgcttgaacctggcaggtggaggttgcggtgagccgagatcactccattgcattccagcctgggcaacaagagcaaaactccatctcaaaaaaaaggaaggagaaggagaggaagaagaagaaaaatactacatgttatgtgtatgagagagaaagagagagactgattcactgaacttagaaggtccaaatcatccaaataattttctaagtttatccaggttttcttggatgcaaaatccttttccacctctatataattaccagaagaaacttacaaaaaaaaggaaatgctattgcctgaatttctcttgctcggaatcctgacatattcttgaagaaggggaaaaagacaccggatttgtcttatcgtttggagctttaaatataaatgactggatgttttctcaacatccttgtaggatggaaggtgaatacaggattattccatttttaagacaaaaactactagtcttgtgtacatacaaagctcccattacatggtataagtcttttgcttggtttcccttagtatgtgattcagtaaatgggttccttacaaagtgctgagatttcttataataccacttacttttaacctttcagtagttttctttgttgtatattttgtgttctttttcccaaattattatataagtttaagtgatgcttagaataatgtttaagaccactttaaaattgcataatttattgatgaaggattaaaatagaaacttgcttttcagtgtatatgcatttgaatcattgaaacacagtctgtgcatgcattacatattcacattaaaaaactaagcatttttgaaatagcagaaaagtttaagcaattacaaaaatgtgaaaatttccaactttaatcctgttaatatttagcaatattaggcgagaacatctgtaactattgctgaattaatattacttttataatacaaaaatttaaaataaacgtttttccaggaattttatcatcaaaataaaccccagaaaataatttcaaagtggataatctatccttatatatgtattaatacaattatatattttacatttacaaatatataggtataaaaattaaaaatgaatgtacttccaaacaagattgcacataaaaattacttcagaaaattgttaagatacacagaaaaaattgaagcatcataaaaaggaaattataatagtttacatatctagaaatagagtgcaaagttctaccaagaataagaataaattaatattaagcaatggtttgtgattttataatacacttacagaaattttattccactttatttacaactcagatatctaaaaaatagattgcttttgaaatacaaatgcaagaaacaattggagaaatctaaaatcataattagaagagagtagtgttttctttatcagccatctgatataatgttacacatcagtgggtgtagtaacggcttaggactctgagcgccgctgttgatcaactctaagcgaaaatcaggactccatccggatttccagttctgcggctacacaaaacccggcagataccacaaacctgctcccaggctgcagcaaaactcagcctctttcttctaaggaaaagatcaccatactttgcagggtggaagaaagaacctgatgaagcagcgcgcacagagatccttttgagaaaattccaaagcgaggcagcaatggcagctccaaccaaatgccagctccgcggaagattagtcctgctatgctcgctcctggggatgctatgggaggccagggccagtcagattcgctactcagtgcctgaagagacagaaaagggctatattgtgggcaacatctccaaggacctggctctggagccccgggagctggcggagcgccgagtccgcatcgtctctagaggtaggacgcagcttttctctctgaacccgcgcagcggcaccttggtcaccgcgggtaggatagaccgggaggagctctgtgctcagagcccgcggtgtctggtgaactttaaagtcctggttgaagacagagtgaaactgtacggaatagaaatagaagtaactgatattaacgacagcgccccaaagttccaggccgaaagtctggaagtaaaaattaacgaaatcgcggttcctggagcacgttatccacttccagaagctattgatccggatgttggcgtgaactccctccagagctaccagctcagccccaatcaccacttctccctgaacgtgcagactggagacaatggagccataaacccagagctggtgctggagcgcgccctggacagggaggaggcaactgcccaccacctggtcctcacggcctcggatggcggcgagccgcgtcgctccagcacagtgcgcatccatgtgacagtgttggatacaaatgataatgccccggtttttgctcaacggatttaccgagttaaagtccttgagaacgtgcccccaggcacctggctgcttactgcaacagccagcgacctggatgagggaatcaacggaaaagtggcatacaaattctggaaaattaatgaaaaacaatctctgctattccagcttaatgaaaatactggggaaatatcaacagcaaaaagtctagattatgaagaatgttcattttatgaaatggaaatacaagctgaagatggtgggggattgaaagggtggacaaaagtgctcatttcggtggaagatgtaaatgacaatagacctgaagtgaccattacatctctgtttagcccagtgagagaagacgcacctcagggaacagtaattcttcttttcaatgctcatgaccgagactccgggaagaatggtcaagttgtctgttctatccaggagaatctatcttttacattagaaaattcagaagaagattattacagattgttgacggcccaaattcttgaccgagaaaaagcctcagaatataatatcacggtgactgcaacagacagaggaactccgcccctgtccacagaaattcacatcaccctgcaagtgactgacatcaatgataatccacctgctttctctcaagcctcctactcagtctacctcccggaaaacaacgccagaggtacttccatcttctccgtgattgcctatgaccctgatagcaatgagaattctagagttatttactccttggcagaggataccatccaagggtctcctctctccacctatgtctctattaactcagacactggtgtgctgtatgctctgtgctcctttgactatgagcagtttagagatttgcaaatgcaggtgacggcaagtgacagtggaagcccaccacttagcagcaatgtgtcattgagactgtttgttttggaccagaatgacaatgccccagaaatcctgtaccctgccctccccactgatggttctactggtgtggagctggcaccccgctctgcagagcctggctacctggtgaccaaggtggtggcagtggacagagactcaggccagaatgcttggctctcctaccgcctattcaaggccagtgagccagggctcttctcggtggggctgcacacaggtgaagtgcgcacagctcgggccctgctagatagagatgcgctcaaacagagccttgtggtggctgtacaggaccatggccagccccctctctcggccactgtcacgctcacagtagccatagctgacagcatcccagacatcctggctgacctgggcagtcttcagatccctgcagacctggaggcctcagaccttaccctctacctcgttgtggctgtggcagtcgtctcctgtgtcttcctcaccttcgttatcacgctgctggccctcaggctgaggcactggcactcctcgcatctgctgcgggctaccagtgatgggttggctggtgtgcccacctcacactttgtgggtgtagatggggttcgagctttcctacagacctattctcaggagttctccctcaccgctgactcaaggaagagtcacctgatcttcccccagcccaactatgcagacacactcatcagccagcagagctgtgagaaaaatgagcctttgtgcgtctctgttgattccaagtttcctatagaagacacccctttggttccggtgagttcattttttttctttctttcttttctttttttgttttttgttttgttttgtttttgagacagagtcttactctgttacccaggctggaatgcagtggtgtgatctcggctcattgcaacctccgcctcccaaattcaagcgattctcctgcctcagcctcccaagtagagtagctgggactagagtagagtagctgggactacaggcctcccaagtagaataactgggactacaggcacgtgccaccacgcccggctaattttttgtgtgtttttagtagagacggggtgtcaccatgttggccaggctggtcttgaattcctaacctcaagtgatccacccacctcagcctcccaaagcactgggattacaggcgtgagccactgcgcctggcccttaactttctattatagttagctttctctttaactgtctgtacttaaggtagtataagttgatatcagtgtgtttctcatcacttttcactgggcctaattgttgctccaacactgaaaggaggcatttattagttatatttgctgatataactttcatgttctcataataattaacctgctgtcaacgtaaaccatacttcatggggtagctctcagcctgcattgatgtgggctttttgggtagggttgcttcattggttgcagtggactcatatcataaaattcttactcctttttttttttttttaagagatgggggtgtcattctgttgtccagggtggaatgcagtggtgtgggtaaagcttactgcagtctcaatctcctgggcttatgcaatcctcccacctcagccttcacagtagctaggactgaggtgggagggctagcaagctatgttgcccagactggtctcaaacgatcttcctgcttcagtttcccaaagcactgggtgaggtgtgaaccacctcacccagcaaattcttactcctacgatcatttattcaggtcatactatgtttgtaagggtaaactgataaaaaggtaaatgtattcttcttagagaaacagctgaaagcccagatttattgcttctattcttccatttctatgacaggaaaacacctctttgaggttatatttttcagatcacaagtgtgtaaagtctgtttgtgtttacagatattttctgacgaagattcaaacttcagttatccacttccaaaccctagtaaaccaattttttccctttaatggtgaaagttgtcacatcttttattctcatatcttcaaaggtcttaatttcctaatgctttaatgttaaattatggagaatagtaggacattcttcttttctatagtatatgcttgctcaagagaagtttctaagactggacactgtgaaatgacaaaacaaggaattaaaaatatttctctcacttatatattatttctggctcaattctccaacttttgagtctagaaatgaacttgcatatcagatataatttaagaaaatattctcaggaactgctgggaagattctaaaactattttactgtttttagctataaggaagagaataatgtattatttaatgttattttaaacatagtgttgtttcaaatagtaaataacatttcacaagacatttgaaaataagctttgaagttgactcaaaattctatgctaaacatgtgatccatagatacactgatgactgctggcatttctgtggaaatgaagaattgttttatttgtttgtaattatttgggtttcagttgctttatttttaagaaaaaaaagctgaagtgtctgggaatcctttatgacatacagacattttaattatttcaaacacgttttcccccttaagtgggtagcaaaaaaaataaagcatacttcaggctcatatttttaaccatgcaacaagaaaattgttacaatttctgttctgaggagtagccttcatacttagtatttataaatattgaaatgtatgttaatttggggaaaacataacagatatccatgaaggcttgtatgtcatggtaggtagttactattcgataccacaaaaatgtctcttgcccttaaaaccagaacacgaggctcaccagacagatgactgaatggagtatggaaaatctttatttctgtttttcttaggctatgtaggacttaacttattgtgcattggtaacagattgtagaacataagctgaaagataaaattcttgaccttaatgtctcatcttaaaaagaagcattggttgacattctatatctcgtattacttaaaaataatgggggagcgcagtatatattaaacaaagattggctttgtggtgatcattgttgaaggtggggtgatggctatgtgaaggttcactatatatactccctactgttgtataagtttgaaattgtgcataatagatttatttaaaacacaaagcatagaaatatctactataatattatggtgagagcaaaatttgagggggatgtacacctgcattttcgaagaatatatacatttcggagaccgaattcaaaatgaaaaaccgggctgctgtcccgcacggagcctctgggcgccgctgtcggccagtgcagagcaagcgctgacgccggggatccgtcagcctctggcctgggattccctgcgcagccaacaacagaaagaagaaaaccagctcccacacagagcctcccggctgcgcagacctttcccagcacagcggattgccagctccgagacccgggactcctcctgtcctgggccgaatgctcttttagcgcggtagagtgcactttctccaactggaaaagcggggacccagcgagaacccgagcgaacgatgggagggagctgcgcgcagaggcgccgggccggcccgcggcaggtgctatttcctttgctgctgcctttgttctaccccaccctgagtgagccgatccgctactcgattccggaggagctggccaagggctcggtggtggggaacctcgctaaggatctagggctcagtgtcctggatgtgtcggctcgcaagctgcgagtgagcgcggagaagctgcacttcagcgtagacgcggagagcggggacttacttgtgaagaaccgaatagaccgtgagcaaatatgcaaagagagaagaagatgtgagttgcaattggaagctgtggtggaaaatcctttaaatatttttcatgtcattgtggtgattgaggatgttaatgaccacgcccctcaatttgataaaaaggaaatacatttagaaattttcgaatctgcatccgctggtacacgactatcgcttgaccctgccacggatcctgatataaacataaactcaattaaagattataagataaactctaatccttatttttcattaatggttagagttaattccgatggtggcaaatacccagagttatctctggagaaactcctagaccgggaagaacagagatctcatagcttgatattgactgccttggacggaggggacccaccaagaagtgccaccgctcacatagaaatttctgtcaaggataccaatgataaccccccggttttcagcagagacgaatatagaattagtcttagtgaaaatctgccccctgggtcccctgtgttgcaagtgacagccactgaccaggatgagggggtcaatgctgagataaactactacttccgaagcactgcccagagcacaaaacatatgttctcattggatgagaaaacaggtatgattaagaataaccagtcatttgattttgaagatgtagaaaggtacaccatggaagtggaagcgaaggacggaggtggtctctctacccagtgtaaagtaatcatagaaatccttgatgaaaacgacaacagcccagaaataatcatcacttctctctctgatcagattttggagaattcacctccaggaatggttgttgccctcttcaaaacacgggatctggatttcggaggaaatggagaagtcaggtgtaatatagaaacagacattccattcaagatttattcttcttccaataactactacaaactggtgacagatggagccctggaccgagagcagacaccagaatacaatgtcaccatcgtagccactgacaggggcaagccgcctctttcttccagtagaagcatcaccttgtatgtcgctgacatcaacgacaacgccccagttttcgaccagacgtcctacgtggtccacgtggccgagaacaacccgccaggagcctccattgcgcaagtgagcgcctctgacccggatttggggctcaatggccacatctcctactctatagtggcgagtgacctagagcccctggcggtgtcgtcatacgtgtcagtgagcgcgcagagcggggtggtgttcgcgcagcgcgcctttgatcacgagcagctgcgcgccttcgcgctcacgctgcaggcccgcgaccacggctcgcccacgctcagcgccaacgtgagcctgcgcgtgttggtgggagaccgcaatgacaacgcaccgcgggtgctgtacccagctctgggtcctgacggctccgcgttcttcgatatggtacctcgctctgcagagcccggctacctagtgactaaggtggtagcggtggacgccgactcgggacacaacgcctggctgtcctaccacgtgctgcaggccagtgagcccggactcttcagcctggggctgcgcactggggaggtgcgcacggctcgagccttaggcgacagggacgcagcccgccagcgcctgctggtcgctgtgcgtgacggtggacagccgccactctctgccaccgccacgcttcatctggtcttcgcagacaacttgcaagagatactgccagacctcagcgaccgccctgtactctctgacccccaggctgaactgcagttttacctggtggtggccttggccttaatctcagtgctcttcctcctcgccgtgattctggccattgccttgcgcctgcgacgctctctcagccctgctacttgggactgcttccatcctggtctctgtgtcaagtctggacctgtagttccccccaactacagtgaggggactttgccttattcttataatctgtgcattgcacatacgggtacaaaagagtttaatttcctaaaatgcagtgtgcccctacattccaatgaagacatggtttgcagtgtttctcctggagccttaattccacctcatggtggggaggatttgacttcacatcctgagactctgacttcggtgagtttctcttttttgtgtgtgatttatctaatagtctactagtttctcatattttaggcatactactttattttcatatctagaatcatatgtttaaaatccatagctttttacaatattttctcaatgttttttcaattatagttttcactatgtatttggttcataagttgctctatctttttgtaaaataatgtcaccagactgaagatattttgtctttgtcttttttttttttttttttttttgagatggagtctcgcactgttgcctaggctggagtgcagtggcgtgatctctgctcactgcaacctccgccttctgggttcaagcgattctcctgcctcagcctcccaagtagctgggattactggtgcccctcaccacagctaaattttttgtatttttagtagacatggggtttcactatgtcgaccaggctgttcagaaactcctgtcctcgtgatcctcccaccttggcctctcaaagtgctgggattacaggcgtgagccacaatattttgtcaagttctgactatcgaacagaagcagtggtcttggcatctaagaaaacaaacaagtaacctatctattcaaatttgcgaagacttagtgaatttacgatatcttatttatatatttttaaagcctaaaaatattcagaagacaggcccagtggctcacacctataatcacagcactttgataggctgaatcggaaagtatcacttgagcccaagaattgagaccagcctgggcaatatagggagaccccccatctctactaaaacaacaacaacaaaaaaaaacattagcagagtgtggtagcattcccctgtggtcccagctacttgggaggctgagctgggtggattgcttggtcctgggaggtcaaggttgcagtgagccctgatcttgccactgcactccagcctgggcgacagagtgcgaccctgtctctaaaataaataaataaatatgcaggcagggccaagtgtgctgtaatcccagcactttgggaggtggaggtggagaatctcttgagcgcaggaatttgagaccagcctgggcaacacagggagactccatcgctacagaacatttaaaaattagcagggtgtggtggcacatgcctgtggtctcagctactctggtggctgtggtgggagaatcgcttgagcccaggaagtctaggctgcagtgagctgtctaggtgacagagtgagaccctgtctcaaaaaaaaaagacatttctaagaaataaatgaaatactattgcctttgcactcagtctctgtctctgattctctgatagaagatttttgaagaaaaaagataaaatctttgaagagttctatacttggaaggcatagtgacataaacacttctgaacatcctgttctctgtgtgaaagaagtgaacttctataccctttgcatttgagggaacaattgctactgggttgatgggcacacacagttgaagatatgtgaaccactggactttggcctctgatacaaactgcctaagagaagagattatttatactggtattaatgctctgatgaaaacaggtcatttgacataaacacttacttgttaaaaacctatatcactacatctaactttgttttctaaaacttttagtacttcaaattctacgtatttcttttctcattacaatgcaaacagtttaatttgcaactgtaatatatgttcattttagtttgtgattacctgcttaatcatttaaataggtccatttaacttgtatccctgtaagataaagtatgttttacacaaaaaggttaattaaggctcagtaaaactattctagaagagtactttaaaaacctcttacacaatcctaagctaaataagtttaatgaattaagtagttacaattataaagcttcagagtgaattatctcatgagtttatttaatataatctttgtatgaatgtatactaaataaaattggcctattcaaatcacaattttaaattataagacttttctgaatttacctagacactaatatgacctaaaataagtattatttaccttttattaaagtgtgtacatttctgttgggaaaacgtgttgcaaatatatatttaaccaaacattatcttgaaatatttacaatattttcactccactttatcacacctcccctaagaaacctacatatagtaaattatttaaagataggagtggagaaaccaaagaatctatgtaaaatataataatccaacagaatagtttactttccattgcatgtatcacttgggtgcagtaacttcttaggactctgagcgccgctgttcacctactaggagagaaaacgcagccagagctcaatccggattctcagggcttcaactacacaagccccacaaaccggctgctgggctgcagggaagctcactccagaatttaaagtgcccaggctacagagacaccctgaagccacagaaagacaaaggaaccggttgaaacacacaacgtgtccagtgaggactttgcagaattctgtaaccagactacaatggccgctcaaaggaatcgctcaaaggaatcaaaggattgcagcgggctggtcctgctctgccttttcttcgggattccatgggaggctggagcccggcagatctcctactcaattcctgaggaattagagaaaggctctttcgtgggcaacatctccaaggacttgggtctggcgccccgggagctggcggagcgcggagtccgcatagtctccagaggtaggacgcagcttttctctctgaacccgcgcagcggcagcttgatcaccgcgggcaggatagaccgggaggagctctgcgctcagagcgcgcggtgcgtggtgagttttaatatccttgtggaagacagggtgaaactttttgggatagaaatagaagtaactgatatcaatgacaatgctccaaaattccaagcagaaaatctagacgtaaaaattaatgaaaatgtcgctgcgggaatgcgttttcctctcccggaagctattgatccggatgtgggcgtgaactccctgcagagctatcagctcagccccaataagcacttctccctaagagttcagagccgtgccaatggcgtcaagtacccggagctggtactggagcactccctagatcgcgaggaagaggccattcaccacctggtcctcaccgcctccgacgggggtgaccctctccgatctggcactgtccttgtcagtgtgactgtcttcgatgcaaatgacaacgcgccggtcttcaccttgccagaataccgagtgagtgttcctgagaatttgcctgtgggcactcagctgctgacagtcacagccaccgacagggacgaaggtgccaatggagaagtgacatattcattccgaaaattacctgacacgcaattgttgaagttccaactaaacaaatatactggagaaataaaaatatcagaaaatctagattatgaagaaaccggtttctatgaaatagaaatacaagcagaagatggaggagcatatcttgcaactgcaaaagtgttgattacagtagaagatgtaaatgacaacagtccagagctgaccatcacgtctctatttagtccagtgactgaagattcacctctgggaacagtcgtagcccttttaaatgtgcatgatttagactctgagcagaatggacaggtaacctgttccattttggcgtatctaccatttaaattagaaaagtccattgacagttattacagattggtgatacacagagcccttgacagggaacaggtatcctcttacaatatcacagtgacagccacagatgggggaagtcctcctctatcaacggaagctcactttatgctacaagtggcagatatcaatgacaacccacctaccttctctcaagtctcctactttacctatatcccagagaacaacgccaggggtgcctccatcttctcagtgacagcgctggacccggacagcaaagagaatgcccagattatttactccctggctgaagacaccatccagggggtacctctgtcctcatacatatccatcaactcagacactggcgtcctgtatgcactcagatccttcgactatgagcagtttcatgagctacagatgcaggtgacagccagcgacagcggggatcctccactcagcagcaacgtgtcgttgagcctgtttgtgctggaccagaacgacaatgcgcccgagatcctgtaccccgccctccccacagacggttccacaggcgtggagctggcgccccgctccgcagagcccggctacctggtgaccaaggtggtggcggtggacagagactccggccagaacgcctggctgtcctaccgtctgctcaaggccagcgagccgggactcttcgcggtgggggagcacacgggcgaggtgcgcacggcgcgagccctgctggacagagacgcgctcaagcaaagcctcgtagtggccgtccaggaccacggccagccccctctctccgccactgtcacgctcaccgtggccgtggccgacagcatcccccaagtcctggcggacctcggcagcttcgagtctccagctaactctgaaacctcagacctcactctgtacctggtggtagcggtggccgcggtctcctgcgtcttcctggccttcgtcatcgtgctgctggcgcacaggctgcggcgctggcacaagtcacgcctgctgcaggcttcaggaggcggcttgacaggtgtgtccggctcgcactttgtgggcgtggacggggttcgggctttcctgcagacctattcccacgaggtctctctcaccgcggactcgcgaaagagtcacctgatcttcccccagcccaattatgcggacacgctcatcagccaggagagctgtgagaaaaacgatcctttgtctttgttagatgattcgaagtttcctatagaggataccccattggttccagtgagttttattttcatttttacttttgttaaaaaaaaaaagattggtttttactttgaagtttgcggcatgatggtggaaagtgtaaatgctaaaacactgatgagtagaatttgatgtttattaaggttttttttttttttttttttttttttttttttactttctggtaaaattcacctagtctcaatcaaggcctatatatcataaggctttgttatgattagctttgcagaaccttgtagtttatagtgttgttgagtacaatattgacaattcctaagacagacttccatacagaagtgcctgtcaatttatatttcctcctgggtggtcacatattgaaactccagccccttaagcaaccctcttgttctgaaggcaggtctggtaagaataggtaagtatcagaaagaaatcacctctggaaacacaacccaaatccaagaatactcaatgcagttcttcccaaggagaagggcaataggcctttttcaaactacattttatatatttttcaatctatactttgtggtgatagttgcagttgaatatactaagtttttcattaatattgaattaacaatttatttataacaatgtatgcttagatttttccagccctatttataactgataacactgcagtatcctttttgcatacaattctctaatttcacactgctatgtggaagatatagcattttaatttaactttcattgctcaatagggatcctgaggaggctatagagggtgaaattaagaatatttgggattctgcttttgtcttttttgttaaattttctagtgactaaggctgaaagtaaatatgggttgggaagacagataaatttgtacatgttcccgagaacaggagcaagagatatatgacaaagctatttcagtggctctttaatgtataaggaggcaaacacctgaaactctgaaaactctgaaattgagaggcaaaataaacttagagtcaagaaagaaatgccatttctgcagatcagaatataaacaccaaccacagctgtaaaaaagaaaagaatatatgcaacgaagggaaattatataaacaaaggatcattggaggtactgatgagttcatttagttcaatgaaaatagtgacgtattaggtagatctcttaattttattactagtattctactaaatgtggtagtataaagtcaaaaagcattccgaagtttctcaagacccttataattccatgatttttttcaggtcagtcaacatttgttgaatgataggtctgtggaaggaaagcacactctttagggtcatagttattaactattaaaccattgaaactattattttatatttgtgttaatgagagtcaaaattattgtgcattcatctcaaataattctattattttgaaaaatacaggttttttttttaaaaaaaactgctcttgacattgtagctattgtgagaaaatattttgattataattatttaaaagcaatacaggacaccctggatgatggtaatgactagggcaatggttgcattccagtacttaagtatgaaataaggaattattactttctgggtgaatataggctagaattgaagacaaaaaaatttgttgcttatcttcagtacttccagcttcatagataattactcttaaaaggaacaagaatgactgcctctggatggaggaattggatagcaatgggccgtgggataggagacctataaaccttcatgctatattattttgtgcctttttaaattttgaagaaaaaatattcatttattcaagatatatgtaaattcagtaaataaaaagatatgatagttatgaccaagtggaaatatatttcctgatgtaaaaggaatcactgaggaaaaagattaaaatattttggctgtcaactcgtagtttaaaaaaaattccttgaaagaggtagagaaaagtcaagttgcagtcccacacagagcctctgggcgccgccgtcggccagtgcagagcaagcgctgacgccggggatccctcagcctctagcctgggattccctgcgcagccaacaacagaaaagaaaaccagctcccacacagaggctcccggctgcgcagaccttgcccagcacaccagattgccagctccgagacccgggactcctcctgtcctgggccgaatgctcttttagcgcggtagagtgcactttctccaactggaaaagcggggacccagcgagaacccgagcgaacgatgggagggagctgcgcgcagaggcgccgggccggcccgcggcaggtactatttcctttgctgctgcctttgttctaccccacgctgtgtgagccgatccgctactcgattccggaggagctggccaagggctcggtggtggggaacctcgctaaggatctagggcttagtgtcctggatgtgtcggctcgcgagctgcgagtgagcgcggagaagctgcacttcagcgtagacgcgcagagcggggacttacttgtgaaggaccgaatagaccgtgagcaaatatgcaaagagagaagaagatgtgagttgcaattggaagctgtggtggaaaatcctttaaatatttttcatgtcattgtggtgattgaggatgttaatgaccacgcccctcaattccggaaagatgaaataaacttagaaatcagtgaatccgtcagcctggggatgggaacaattcttgagtctgcagaagatcctgatattagtatgaattcgctgagcaaataccaactaagtcctaacgagtatttctcattggtggagaaagacaatcctgatggtggcaaatatccagaattagtattgcagaagactctggaccgagaaacgcagagcgctcaccacttggtactgaccgccttagatggtggggaccctccccgaagcggtactgctcagataagaatcctggtaatagatgccaatgacaaccccccagtgttcagccaggacgtgtacagggttagccttcgggaagacgtgcctccaggcacctccatcctgagagtgaaggccactgaccaggacgagggcatcaactcagagatcacttattccttctttggtgtggctgacaaagctcagcacgtgttctctctggattacactacaggaaacattctaactcagcagcctttggattttgaagaagtagaaagatatacgataaacatagaagcaaaagaccgaggatctctctcaacacggtgtaaagtaattgtagaagttgtagacgaaaacgacaacagcccagaaataatcatcacgtcactctctgatcagattatggaggattcccctccaggagtggttgttgccctcttcaaaacacgggaccaagactcaggggaaaatggggaagtcaggtgtagcttaagtagaggtgttccatttaagattcattcttcttctaataattactacaagctagtaacagatgaggccctggatcgggagcagaccccagagtacaacgtcaccatcgcagccacagacaggggcaagcctccgttatcctccagcaaaaccataaccctgcacattactgacgtcaatgacaacgcgccggttttcggacagtcagcctacctggtccacgtgccagaaaacaaccagccgggtgcctccatagcgcaagtcagtgcctctgacccagacttcgggctcaacggccgtgtctcctactctctcattgccagcgacctggagtcacgaacgctgtcgtcctacgtgtccgtgagcgcgcagagcggggtggtgttcgcgcagcgcgccttcgaccacgagcagctgcgcaccttcgagctcacgctgcaggcccgcgaccagggctcgcccgcgctcagcgccaatgtgagcctgcgcgtgttggtgggcgaccgtaacgacaacgcaccgcgggtgctgtaccctgcgctgggtcccgacggctccgcgctcttcgacacagtgccgcgggccgcgcagccaggctacctggtgaccaaggtggtggccgtggacgcggactcggggcacaatgcctggctgtcctaccacgtggtgcaggccagtgagcccgggctcttcagcctggggctgcgaacaggcgaggtgcgcatggtgcgtgctttgggtgacaaggactcggtccgccagcgcctgctagtcgctgtaagagatggaggacagccacccctttcagccactgccacgctgcacctggtgttcgcagatagcttgcaagaggtactgccggatttcagcgaccatcccacaccctctgactcccaggctgagatgcagttttacctggtggtggccttggccttgatttctgtgctctttctcctcgcggtgattctagctattgctctacgcctgcgacagtctttcagccctactgcaggagactgctttgagtcagttctctgctccaagtccggacctgtgggtccccccaactacagtgagggaacgttgccctatgcctataatttttgtgtgcctggggatcaaatgaatccagaatttaattttttcacatctgttgatcattgtccagccacacaagataacctcaacaaagatagcatgctactggctagcattttaactcccagcgttgaagcagataagaagattcttaaacaggtaagtatttaaaaatgtatttaatcctttttatattacaatatgccaatatattccaatatagtggtattattttaagattctagataacttcttcatagagttcgcaaaatataggtcaaatttatggttatcattattaaaacaaaagtttaaattaaatgcctcagtcttcctactattcaaagacattttaaagcaaactacatgggtaatctccggtgacatttttatgaagtaaaatacctttcggttaaaaatataaaatacaggtatatttttacggcatggtattttaattgaaaccctgatgctactcaatttttctcaagtatttcatcttcatttactcaataaaggaaccttgtaagaattatagttaggcatcctacctgatgattttatcgggaccgtattatttccacttccagaaatgtcgttcctttcagtcggttaaaatcaattggaaccaactacaacctacaagttttcagctccagtaatattttgaaaactttttaaaaattaagcaagcccttttaataattactcctttcgcaggtgttcttggtaaagttttaacgtcacataatgtaagtattgtgtatcatcgtttttaagctctacaaatacgtgtgattcacaaaggtgagcgtaatcatttcttctggaatttcttagtcgttgcaataataagaatgggctctaggcgccgctgctcaccaatcagggaatgggaagctgcgcgccattgagtccctccctcccccgcctctaccacacaaagcggaatgagatggatactcacagatcctgacactggagacttagaagtattttccttcgctttctgatatattttggatgtagtcggcctaggacttcatagatacataagccgattcacaaccaaccagctcgagaaaccgcggaatatcggcttagagcctgccatggcgaatcggctacagcgcggggaccgcagtcggctgctgctgctgctgtgcattttcctggggacgctgcgggggttccgggccaggcagatccgatattcggtgccagaagagaccgaaaagggctccttcgtgggcaatatctccaaggacctggggctggagccccgggagctggcgaagcgcggagtccgcatcgtctccagagggaagacacagcttttcgctgtgaatccgcgaagcggcagcttgatcacggcaggcaggatagaccgggaggagctctgtgagacggtgtcctcctgttttttaaatatggaacttctcgtggaagacaccttgaagatttacggagtggaggtggaaataatagatattaatgataacgcccccagcttccaggaggacgaagtggagataaaagtcagtgagcacgcaattcctggggcgcgatttgctcttcctaatgctagggatccagatgtgggcgtgaactccctccagagctaccagctcagccctaataattacttttccttgcaactgcggggcagaacggatggggccaagaatccagagctagtactggagggaagcctggaccgagagaaagaggctgctcacctgctcctcctcacagctttagatggaggcgatcccatccgaaagggcgcagttcccattcgtgtggtggtcctcgatgtaaatgatcacatcccaatgtttacacagtccgtatatcgcgtgagtgttccagaaaacatcagctccggaactcgggtgctgatggttaatgcaacggatccagacgagggaatcaacggggaagtaatgtattcatttcggaacatggaaagcaaggcttctgaaatattccaattggattcacaaactggagaagttcaagtacgggggtctctggattttgaaaaatatagattctatgagatggaaattcaaggccaagatggtggaggtctctttaccaccacgacgatgttgatcactgttgtggatgtgaatgataacgctccagaaataactatcacctcttctattaattcaattctggaaaactctcctccaggtacagtgattgctcttctaaatgtgcaagatcaagattctggagaaaatggtcaagtctcctgttttattcctaaccacctgccttttaaattagaaaagacttatggaaattattacaaattgataacaagcagagtgctggacagggagttggtccagagctacaatataacgttgacagccacagaccagggaagcccgcctttgtctgcagaaactcatgtctggctgaatgtggcagatgacaacgataaccctcccgtttttcctcactcctcttactctgcctacattcccgaaaacaaccccaggggtgcctccatcttctcagtgaccgccctcgacccggacagcaaacagaatgccctggtcacttactctctgacggatgacactgtccagggggtgcctctgtcctcctatgtctctattaactccaacactggtgttctctatgccctacaatccttcgactatgagcagtttcgagacttagaactgagagtgatagcacgtgacagcggggacccgcccctcagcagcaacgtgtcgctgagcctgttcgtgctggaccagaacgacaatgcgcccgagatcctgtaccctgccctccccacagacggctccactggcgtggagctggcgccccgctctgcggaacctggctacctggtgaccaaggtggttgcggtggacaaagattcaggccagaacgcctggctgtcctatcgcctgcttaaggccagcgagccgggactcttcgcggtgggggagcacacgggcgaggtgcgtacagcgcgggcactgctggacagagacgcgctcaagcagagcctcgtggtggccgtccaggaccacggccagccccctctctcggccaccgtcacgctcaccgtggctgtggccgacagcatccccgaagtcctggcggacctcggcagcctcgagtctctggctaactctgaaacctcagacctctcgctgtacttggtggtggcggtggccgcagtctcctgcatcttcctggtctttgtcatcgtgctgctggcactcaggctgtggcgctggcataagtcacgcctgctgcaggcttctgaaggcgggttggcaggtatgcccacgtcacattttgtaggcgtggacggggtacaggctttcctgcaaacctattcccacgaggtctctctcattgcggactcgcagaagagtcacctgattttcccccagcccaactatggggacacgctcatcagccaggagagctgtgagaaaagcgagccactcttgatagctgaagactcagctatcattttaggcaaatgtgacccgacaagtaatcaggtgagatttatttctctgcctcctaattgttggtgtcttggcacaagtcttttaaggagatgttttttgagcctgttatgaaaactgtttggggggggggtggggcggcatatatttagttcatatatatttagagcaatacatgtgagttttactttgcctttcatgagattacgataatctttcagaacgtttttgtgaaagtcatttttcaatcttggcatattttcttttgatttcaaaggggccattcaactatgctggtttggtttgaagtaagttgaattttagtattatttttctattatcagtgtatgaggctctcaatttattatatatagatacaaattaatgattcacaaacactttttatttccatttcaattttgctgtgccttcactgatttgtagttatattccaccattatttgctattactgctaatgttcaaattttgatcctgttgatttaatagcatgctccctctagctctccttctcatctatctatctatacacatgcacacacacttatacacgtaagcttttctctgagcaattttattttgattcttggtggctggtaatatgcttagatcctgttgactatttcaactttgtctcatttcttcatcctatcaacacagacatattgactggcttttaactactggatttccttgggagataaaatttagatcacattttttcttaagctctagatgtcttttccattactatggtgaagttacattgactgttctgaggaaataattgaattattgaactggtattatttccttttattcttttactttggtgtctgtgtttgtatgtatggaaggttttttaatgtagtaaatccatatatagaaataacttgattttgattcagtgcttctcaaaaacctattttcaaatgtgctaaagatgtctacagatttattcaaatagagtagtttgtgaatatataaatagattgaaggtatttggactttaattaaactgatttagctagtatccttctggctatttttttgttcattttcagtgtagttgggagtcatagattccttctttctttctttataaggtcattcttatggcaaatagtacattcagttcttttattcagaccaacttgttattgaagcttgatagttgcctgacatacatgttatctgaagcaatgtctaggaaagccaaatgaggaaaggagacttatctagggtttttgatcacaggaatcatttccataatcaattcagtcaacactctcacatcacttctaggtatttgccccaaattacttggatatttatgttccctttcaagtttagttttctcatttaggaatttaccttatgtcattagttgtaaactgactatctagggctcggacaaaaataatttcaactgtaggaaaggcaagtcttccaacagatgcctacatttttcttgaagtcaagaaaaatgttcaggtattttgagcatctagggataggatttatacttgtggaattccaaactgagaaaaatgatgtaaggcattgtactttgactggaattagttaaataaaaaggatatgaggtatttggctgggaaaaggagattgttccatattataaaacctcatctaaactaacttcccaagatcgtggagaacaaaaaggaagggttggctttgaaatgtgatattaagagggttatgttgattcggaggtagtgataaagttctgttaaggtataacatatagtcccattaaatagaggataaaaataaaacaccatcacatttcatgttattaattcctatggcaacctactaggctatacctttatattctctttatgatgaaacatgaaacaataatccttttcagaaacctcttttataagtgataagaagggtttggctaactttattctgaatatgccctatatagctttcagtgctcctccagttttctctgataaaactaggaggaaaattatctgcacatcagattgaaaataatactgcatatcatttcatagtggtcaaaattttcccataccacttgatggggatgttttcccacaaggtttttgttctacaacaggagagaagactttgcctagttcttccaatatgtgcattgcttctgcttagaaaaaaacaaacttttaaattctctttgctgggttaatgactgttctatagattcccatctctaaggaatcttctttggtagtaaacactggaaaacagtcactacgaaaactcataaaatgtctagtttcctatacattagtccaacacatcagtctaattctgaatcccattgaattagcaaaggcttccggctgcagttttctaaatagactcagagccctgctgttggccaatgtgctgcaagaactggagcctgggatctaccaggacgatattctgttcagtcacagaagcaagtcggagagtggccaagacttgggctttctgctcctgcaaatctgattccatacggattggggtgccctcaaactgggagcattgagttttctatgtatggaagtaaatattttaaaagcactttgtgaaacattttctcttaacgtcggagactgcagcaacgcatgggaaggatgggaaacagggtgaagcagagaagcaggacccggcagtggcaagcactcttccctttcctgctgcctttgttctgcggggcaccctcggagcagatccgctactctattccagaagaaacggtccagggctccgtggtggggaaccttgcggaggacatgcggctgcatgttcaggatttattgacctgaaaccttagagttagtgcagagaaacaatactttaccgtgaacacggagaatgggaacatacttgtgagtgacagaatagatcgagagtcactgtcttcaaaatcctctgtgtcatacccttagagattgtagcagagaatcctctaaatgtttttcacataaatgtgatgatagaagatataaatgataacccacctcattttccccaaaatagcattgttttacaaatcaatgaactagcaattccaggcattcggtttggcctggaatctgctatagatgcagatgtagggcctcactctctccagagttaccagctcagttctaatgaacatttctctctgatgatggacaagactaaaggcaagaacgctccagaattagtgctggagaagcccctgggccaggagcaacagagctctcatctcctggtcctggaagcaatggacatgggtgacccagtcccaactggcactgctgcaattcaaattgaggtcactgatgccaacgataatgccccagtttttagccaggatgtatacaaagtcagccttagagagaatgtgcccccaggcacctctgtactaaaggtgacagccactgaccaggatgagggtgtcaatgcggagatcacctactctttcaaatccctacgagatgatattggaaatatgtttgtgctagaccatcaaaatggggaaattaaatccaaagacttaatagacttcgaatttcgtagcagttataccatgagagtagaagctaaggatggtggaggcatgaccagcgaatgtaaaattatactagaaatcctagatgagaatgacaatgccccagacgtggtttttacttcagtgtccagttctgtaactgaggacgcagaaccctggacggtgatcactctgttcaaaacacatgataaagattcgagagaaaatggggaggttacatgcctcataaacgaaagagttccttttagaatcgaatcttccgccaataatgactataagcttgtaacagatgggaccctggattgggagcggatcccggagtacaacgtcaccatcactgccactgacaagggcaagcctccgctctcatccagcacaagcctcaccctacgcattggtgaagtcaacgacaatgctccggttttccaccaagtctcctacgtggtccacgtggccgaaaacaaccttcccggagcctccatcccacaagtcagcgcctctgacctggacctagggctgaatggccaagtctcctactccatcgttaccactgacttggagctgcgggcactgtcgtcctacgtgtccgtgagcgcacagagcggggtggtggtcgcgcagcgtgccttcgaccacgagcagctgtgcgccttcgagctcacgatgcaggcccacgaccagggctcgcccgcgctcagcgccaacatgagccggcgcatgttggtgggcgacctcaatgacaatgtgccgcgggtgctgtaccccgcgctggggcccgatggctccgcactcttcgatatagtgccacgcgccgcagagtccggctacctggtgaccaaggtggtggcggtggacgcagattcgggacacaacgcttggctgtcctaccacgtgctgcaggccatcgagcccgggcttttcagcctggggctgcacacgggaacctgctggttgctgtgcgtgacggaggacagccgccgctctctgcgccgctacgcttcacctagtcttcgcagacagcctgcaggaggcactgccagacttcagtgacagtcctgtgccctctgattcccaagcaaagctgcagatttacctggtcgtggccttggccttgatttctatgctcttcttcctcgcagtgattttggcggtcgccttgcacctgcgatgctcttccagcccctctgcctggggttgctttcaccctggtctctgttctaagactagaccaggggtttttcccaactacaatgagggaactttgctttattcctgcaatctgtatgttccctcggattctagaaaaagaagatttaattttctcaccatgacaccagaaacagtccccccacaagatctttctaatgaagtttctctggtagcaagcttcactgaagagaataacaagataagctctaactctgttgctcctactcacgtgagttccaatgaatgtctttcatttacaaatggatgaggtttaattttcaaaccaatattttggcaagaaaatcttaaacatattatatctactattgcttcaggtttgtttgcccactcttaatatttcctgttcctttctgtgtgggccagtaacttcattattagctttcatgtatttttgaaacattttcaccatttttacgggagactttttttttttttggacggagtctcgctctgtggtccaggctggagtgcagtggcatgatctcggctcactgcaagctctgccttccgggttctggccattctcccgcctcagcctcccgggtagctgggactacaggcgcccgccaccacgcccggctaattttttgcatttttagtacagacggggtttcaccgtgttagccaggatggtctcgatttcctgacctcgtgatctgcccgcctcggcctcccaaagtgctgggattataggcgtgagccactgcacccggcccggagacattgtttatacacacacacacacacacacacacacacacacacacgtgtgaaaagtgggtattatgatactgctgtcattgagatattttaattgaggaataaatttttttcctgtgatgtttcttgggacatcaatatttgagtatataaggctttttctttaatccattaactataaattttgaagaaaatgcatgagaaaatggagaaaatgtgttttttttttaaaaaaaattgagattaaggtctcattatgttgcccaggctggactcaaactcttgggctacagtaatcctcccacctcaatctccagagtagctgagactacagttgcctgaaactgtgcctggcagagaaaaaagcttaaaaaaataagaacatggtaatgatttgataatattcagttacatttacttttgattcttgtaattcaagtaaactcaattttatgtctgatattttctcacagctacctatatatttcttcccaatttaaaatatattattttattttatgcctagcaaatatctttacagtataaatatttacgctcatgaaagtacgtagccagttatttcttagggagaattttttccctatattttgatgggcttccaaaagtattaccagtaattctcagtaattacaattaggtcagttacccaggaaaaggtaagtctgtaacattctttggactaccaattttcttttactaagtttcctgaacaataaatatttttgaaatataatgtattaatagaattctggagtacttccattatttccagtcaatgcaagttggaatgcttctactttatgctaaaaatattaatgtttctttttcacttgggttcttgttaagtgtgattctgataatgtatacaatcacatatcatttttaggtttccataatatcatgaaaatttgatttttaagcgttacatgtcaacaacctggtaaagtaatccttccattcaggatcattcaaggaatctatttaaaaatattttccccaaattatagctgaatcagaaagtttaaattattatattatatgatttgtcaaaaagagaaactcctagggagacatctccataataggtgtgttgggggaacagtaatctcaaagcagatgcactaacattataagattaaaatcattgtttatagaaacttccaattcatttaaaagctcattggggaaaaaaaagctcattgggaaaaaaaaaaaaagctcactaaagtttctattaaagcgaatacggtagatttccatccccttttgaagaacagtaggtggagctatttaagatataaaaacgaaatatcctttctgggagttcaagattgtgcagtaattggttaggactctgagcgccgctgttcaccaatcggggagagaaaagcggagatcctgctcgccttgcacgcgcctgaagcacaaagcagatagctaggaatgaaccatccctgggagtatgtggaaacaacggaggagctctgacttcccaactgtcccattctatgggcgaaggaactgctcctgacttcagtggttaagggcagaattgaaaataattctggaggaagataagaatgattcctgcgcgactgcaccgggactacaaagggcttgtcctgctgggaatcctcctggggactctgtgggagaccggatgcacccagatacgctattcagttccggaagagctggagaaaggctctagggtgggcgacatctccagggacctggggctggagccccgggagctcgcggagcgcggagtccgcatcatccccagaggtaggacgcagcttttcgccctgaatccgcgcagcggcagcttggtcacggcgggcaggatagaccgggaggagctctgtatgggggccatcaagtgtcaattaaatctagacattctgatggaggataaagtgaaaatatatggagtagaagtagaagtaagggacattaacgacaatgcgccttactttcgtgaaagtgaattagaaataaaaattagtgaaaatgcagccactgagatgcggttccctctaccccacgcctgggatccggatatcgggaagaactctctgcagagctacgagctcagcccgaacactcacttctccctcatcgtgcaaaatggagccgacggtagtaagtaccccgaattggtgctgaaacgcgccctggaccgcgaagaaaaggctgctcaccacctggtccttacggcctccgacgggggcgacccggtgcgcacaggcaccgcgcgcatccgcgtgatggttctggatgcgaacgacaacgcaccagcgtttgctcagcccgagtaccgcgcgagcgttccggagaatctggccttgggcacgcagctgcttgtagtcaacgctaccgaccctgacgaaggagtcaatgcggaagtgaggtattccttccggtatgtggacgacaaggcggcccaagttttcaaactagattgtaattcagggacaatatcaacaataggggagttggaccacgaggagtcaggattctaccagatggaagtgcaagcaatggataatgcaggatattctgcgcgagccaaagtcctgatcactgttctggacgtgaacgacaatgccccagaagtggtcctcacctctctcgccagctcggttcccgaaaactctcccagagggacattaattgcccttttaaatgtaaatgaccaagattctgaggaaaacggacaggtgatctgtttcatccaaggaaatctgccctttaaattagaaaaatcttacggaaattactatagtttagtcacagacatagtcttggatagggaacaggttcctagctacaacatcacagtgaccgccactgaccggggaaccccgcccctatccacggaaactcatatctcgctgaacgtggcagacaccaacgacaacccgccggtcttccctcaggcctcctattccgcttatatcccagagaacaatcccagaggagtttccctcgtctctgtgaccgcccacgaccccgactgtgaagagaacgcccagatcacttattccctggctgagaacaccatccaaggggcaagcctatcgtcctacgtgtccatcaactccgacactggggtactgtatgcgctgagctccttcgactacgagcagttccgagacttgcaagtgaaagtgatggcgcgggacaacgggcacccgcccctcagcagcaacgtgtcgttgagcctgttcgtgctggaccagaacgacaatgcgcccgagatcctgtaccccgccctccccacggacggttccactggcgtggagctggctccccgctccgcagagcccggctacctggtgaccaaggtggtggcggtggacagagactccggccagaacgcctggctgtcctaccgtctgctcaaggccagcgagccgggactcttctcggtgggtctgcacacgggcgaggtgcgcacggcgcgagccctgctggacagagacgcgctcaagcagagcctcgtagtggccgtccaggaccacggccagccccctctctccgccactgtcacgctcaccgtggccgtggccgacagcatcccccaagtcctggcggacctcggcagcctcgagtctccagctaactctgaaacctcagacctcactctgtacctggtggtagcggtggccgcggtctcctgcgtcttcctggccttcgtcatcttgctgctggcgctcaggctgcggcgctggcacaagtcacgcctgctgcaggcttcaggaggcggcttgacaggagcgccggcgtcgcactttgtgggcgtggacggggtgcaggctttcctgcagacctattcccacgaggtttccctcaccacggactcgcggaagagtcacctgatcttcccccagcccaactatgcagacatgctcgtcagccaggagagctttgaaaaaagcgagccccttttgctgtcaggtgattcggtattttctaaagacagtcatgggttaattgaggtgagtttatatcaaatcttctttcttttttttttttaattgctctgtctcccaagctggaatgcagcggtacgatcatagctcactgcagcctcaaactcctaggctcaagcaattatcccacctttgcctccggtgtaacagggactacaggtgcaagccacctactgtctgcctatctatctatctatctatctatctatctatctatctatctatctattactttcttgtacagacaggagtctcactatgttgagcaggctgatctgaaacttgggctcaggctagcctcctgcttctccctcccaaactgctgggattacaggcgtgaaccacagtgccccgcccttatcagatattcttttctggctgggcgcggtggctcacgcctgtaatcccagtactttgggaggccgaggcgggtggatcacctgaggttgggagtttgagaccagcctgaccaacatggagaaaccccgtctatactaaaaaaatacaaaattagccgggcgtggtggtgcatgtctgtaatcccagctacttgggaggctgagtcaggagaattgctttaacctgggaggtggaggttgcaatgagctgagattgtgccattgcactccagcctgggcaacaagagtgaaactctatctcaaaaaaaaaaaaaaaaaactttatcctctagtttcatccattgatgacacttgctttaatcacttattacaatcacctccaaatgaagattttataattccattgtttcttctacagttgttaattggctttctaccttgaagaagagttttatattctctatatatgtttgtttctatgattctggaagcatggttttctattttattcaatggcctgtaatctgttaatatcaattatttattttgatgctgaaattgtcccaggattggcctttgggactccctttaggctgatttctatgtcctttctgttacagcaagcttgggattatatccaagatttgtaattccaatgtacttacttctgtcagtgtaaacaaagtacgatttctggactagatgacttgggcattgtgggggaggtggaaattagaggtattctctgtttttcctgtaggatcttgcatttcttcctcttgctgcttgtctctttgtgtcgggaacaggccccccaaaatctggccataaactggccccaaaactggccataaacaaaatctctgcagcactgtgacatgttcatgatggccgtaatgcccatgctggaaggtagtgggtttaccggaatgagggcaaggaacacctggcccgcccagggcagaaaactgcttaaaggtgttcttaaaccacaaacaatagcatgagtgatctgtgccttaaggacatgcccctgctgcagataactacctcaatccatccctttatttccgcccatctcttcgtttcccataagggatacttttagttaatctaatatctatagaaatgatgctaatgactggcttgctgttaataaatatgtgggtaaatctctgttcagggctctcagctctgaaggctatgagacccctgattccccacttcacacttctaaaaaaaaaaaaatttttttttctgagcttggagaaatatatcccttagtacacttggcatttataaagcagacatcaataaatttatatatatgtgacagataccaacaacaatccagtccccttccctcataccttatttatgtacatatattttatataatagatataatttattaacaatttataaaattactttgttaatactctatatcattttctagctgaatttatcaatgataatgctcttttcccacttttatttttttcccattgaccatgcagcagttttgtgtagaccgtctgataacaactgatctgtttatctaggggggagaaatctaattcaatggaaaatataaataaaattgtgataaacttttgtaaatagagtggcttttaactacacttgagatggctagcaaattcataaagtgaatttactttctttcaaagttcagtaattctttctggccattagggatatgtccatttatactttctcagtatcccaagtcatttcatggttttaaatcattcatgaacttccaaatatagtgaatttatttcttctgcatttaaaattttatcacttaaatatacaatataccgtattgccatgacgaaaaatggtaaagactatttttcacttctgttatgcatttcattaatacgatatctgtatgtgtttccaagttagacatttcttttgcccatttcctacactaatgatactaatgatgactttgtggaatattcagaattaacaaaatgtgttttgagtgctttttttagtactggggcaaatttgcagtaatatcgcctgctttttacattaaattccccataacttttacaactatgggaaaatttctgaaacgtgcacagattccaagtgttttctgagaactttatgcttattgtagagtggttacagacactgaatgctaaagtgtattactctttgaaaagcattgcttgatttcttttggtgaattctgtaaaggtgcagggaaacataacgtcccaattattttttctttcttctttgtttgctgcctatctactttgaaagatacaatagttaaaacccagaaaagagattggaaaccccttagagaatgaaagacatccaagggctctaaaatgcggcagttgctgcttctgagaccaaaaaagggggcaaaatatagagtgtgtggttctacttgtgtgattttttgaaagaaagtatttgaatttatctaaaaatactaaatttgtatttacattagttttcaaatagaatttaataagtacagtgttctataggtaatattgagagaaatagaggacaatgaaacctctctcctccatcatcttgtatgaactaccaaaatgtttatcatatggacagttctcatatatagtcaaatagaaagaaagacataataggaaaacaaatgacttgggaaactaagctaacatggtctaattattctgacctctgctcacctaacttgatttaggaacaaatcattgagagttagagcatgaatagtcaagactgttagaccatatctcaaatatcagtgacttcaatcaactatgtttccagtttaagctgaataggctttattaaatagttgttgaatgaatggataaacaaataatgtactctggggattacctgataccaggattctgaattttcagatgtatcatagaaggatagcagctttgcaattaggtaaattgttaactgtgtcacctttagcaagttatttaatctctttgagcttcagcaaagtaggaataatcatatctaatttgaaaggtcgtggtgatggctagggctaacaaaaatctgattcacaacatgcaattaattaacagtagccatttttagtggttgaccaaaaaaaggatttatattttcaatgccagcacactcgatgttctgttgggaaaaataataatgatttttgtgtgcttctccatatggtataatggaatgatttgtggatggaaataaaactgttctaaaatttttgtgacagctggtttaaaaatcttaagtgcctaggcacattcttgattgagaagccacagttttaggccataaaagatgggggaaagatttttatatgagacaattttgtgagtgttactttttctttgtctgaaccatagtgaaatctaaacaaggatcttgtgaaacttattttaaagaagcagtttacttcaatgggatcttagataatttcaccagaaaatggatcaccgaaaccagaaggctggtgatcattatttggtttgggccatataagaattgaaactaacggcttagctttaggatttttaggacacttgttgataatttaggattcataattaacatatgtgttgattgttttctgagactaactgggcaatgggtttggatgtgtttacatttattctgattccagtcataaaattatgtcaaggactttccttgtctttttatgtgtatgacagatgtgtatgtatccatttcatctaacaagttaaagcgttcagctataatttaaaatttgtagcttcactgttttatagtacctaaaattggaatgtaatcagtcagaagacattcatccactgctttcattccagaagtattatgctttttgaagcagcaatagcataggaatgttgaggagactatactatacttttatagcatatttaatctcgtagatcacttttcaatgaattataaggctgatgacaaatgagcaaattgtatcagttttctttatgacatgtaacagagtatagctgtgatcatgaattggatagttctggtgtaaaaatctgctttatccccatataagatgtcaggttcagaaaagcaaacacatagtttcgaagagatgttgatcaaactgatgaggctaaatctcaagaaagagacacagttaccctctaatgttacactttgagttcacctttttttttttttttgagacagagtctcaatctgtcgccaagctggagtgcagtggcactatcttggctcactgcaacctctgcctcctgggttcatgctattctcctgccttagcctcccgagtagctgggactacaggcacacgccaccacacccagctaatttttgtatttttagtagagatggggtttcaccatattggccagaatggtcttgatctcttgatcttgggatgcacccaccccacctcagcctcccaaatagctgagattacaggtgtgagccaccatgcccgaccactttgagttcacttttaagaaaccatacttaatggaaaattaccagtaacagggcatactgtttaggatgcattcctaaaatattaatggcaaaagatagccagcctatggcaaagctaattggaaaaaatattttataaaggatgagacttctggataccatatgggaagggctctggttcaggaaaatgtttttaaaaaactgtcattgaagagaccatagaatcaaacaaaataatttaatctgtatgtaaaagaagttggtaccaccataatttttcttatacatgtcatataaggatctactctgtgtattgtcattgagggcagatataatttcttagttcatcattaactctctgaagtatttcacacagtagtttgtacaccttctaagtactcaatacaatgcttgagttcaattattggaaagtggtctcttggagaaaaaagaatcatagtgcaaaaccaattattttacatggacttttcctctatatctaagccctaataagaggcagctgtctgatatacatacatacatacatacatatatatatatatatatatatatatatatatatatatatatatacacacacacacacacatatatgtatatatatatttggagtaggggatggagtcttgctctgtcacccaggctggagtgcaagtggtgtgatctcagctcactgcaacctctgcctcctgggttcaagcgattctcctgcctcagcctctccagtagctgggattacaggcgcctgtcaccatgcccagctaattttttaaaatatttttagtagagacagagtttcatcaagttggccaggctgctcttgaactcctgacctcaggtgatccacctgccttggcctcccaaagtgctgggattataggcatgagccaccgcaccctgccaactgtctgacttatcttaaaaggctaaggacctggtttgtttgtcaaattttgaaaatagatgcctcagttcataagatttccatattgtgtggcaggcgcctgtaatcccagctactcaggaggctgaggcaagagaatcacttgaacccgggagacagaggttgcagtgagctgagatcacgccactgcactccagcctgggcgacatagtgagactctgacaaaaaaaaaaaaaaatccatatgtgaaaattcttagaagcttcctatacaatttcagctgaagattcagccaacagttcattctgagactgtgttccatggaaaaagtaaagcccaggcatggaagtgggaatggaaagaaagattctaagcctacaaatactcaaacatcaagaagaaataaaaataagtcatcacttcgacttcatgtgctaacatcactgaggttataaattcccaggaatattttattgcgggagcaagactgcactgctgcctttcagcttgcaaattccagtgagaaacgtctttctctctgctctcaactaactctacagaacgctgtcctctcatttcttcaggctgcagttctagagtagggactcagagtgccactgttggccagtctggaaacagagataaatgagccaatccccagacattccggcttggtggcttttctaatttcatggaatgcaaatccaagagcagacccacaacattcctattatggctcctagttctacaaattataagcaggaacggaacggatttacaggcaatgagttcagctccttcttggctggagattctataatccaagaagagtttgaaaaggggcttatttgggctggagcagcagcaactctaactgtggaaaaggtggggaatggtgctggactgacagtctgggtagaaccaaggcgactactgcctcctttcctgctatttctatcctgctgggcattctctatgatgcagatccgttattcagtcctagaggagctggccaagagtttggtggtgggaaaccttgccaaggatctgggactcagtgtcgaggacatgcccacttgaaagcttcgggttaatgctgaggaataatacttcattctaagtggggaaagtggagacttacttgtgaatgactgaatggatcaggagcagatacgccccccaattatagcttgggccataacgctttgaaatagttgaaggccaggcatggtggctcacacctgtaatcccagcactttgggaggccgaggcgagcagattacgaggtcaggagttcgagaccagcctgaccaacatagtgaaaccctgtctctactaaaaatacaaaaattactgggcatggtggtgcaggcctataatcctagctactcggggggccgaggcaggagaatcgcttgaacccgagaggcaatcgcaccactgcactccagcctgggtgacagagcaaggcgccatctcaaaaaaaatgaacaaacggtagttgaaaattctttaaatgtttttcacattaatatggagattcaggatatgaagaatcatgcaccacggttcagcaggaatgttattaagttacgtatctctgagtttacccagctggaacaagatttgcaacagaacctgcagaagatcctgatgttgagagaaattccttacaaaattatcaccttagcagcaactctatatttctctttgaagtaaaagtgaccaacagtggaaagacatatgttgatcctgtgttagagaagctgcttgactaggaaaagcagagctcccatcccttagtgctagcagccttagacggccccccaacaaagcagcatcactcaactcctgatcctattggttgaagccaatgacaaccctgtgttcatctaggatgtgtacagcgtcggccttcaggaagatgtgcatccgggcactcctgtgctgagagtgagggccaccaaccaggactagagtgtcaaggcagagatcacatatggcttcacaacccagagtacccatatctagtttggccttgatcaaatagtggagaaatgaaaactttaagtacattggacttttaaagatttttaatttccatggttttggtagcaagtgacagagagggactcattgtccagtgtacagttgagaccgaatttctagaagataatgacaatatcctagaggcgatttttacttctaattccacaatgattcccaaagattctgcaccttggacagtaatcactgtccaggatttaaatcacaagatctttaaatcacaagatctggattcgggagaaaacgaggtcacatgtctgatataagaaaatgcaccttgagaaaaatcttcctccaataattaactacatgcttgtaacaaatggggccgtggaccaggaacagacccaaggtataacatcagcatcactgccactgacagaggcaaaccaaccctctcgtccagcccaagcatcaccctactcattggcgatgccaacgacaatgctctggttttctaccaggcctcctacgtcgtccacgtggccaagaacaatcttcccaaagcctccatagtgtgcaagtagacacctccaacctagacttgggacccaacagccaagttccctattccatcgtggccagtgacctggagccacaggcgctgtgattctaggtgtccttgagcgcacagtgcgccttcgaccaagagcagccgcgagccttcaagctcacgctgcaggcccgcgaccaggactagctcgcgctcggcgtcaacgtgagcctgcgcgtgttggtggacgacctgaatgacaacgcaccgcgggtgctgtaccccagctctggagcgcaatggcttcgcgctcttggatatggtgctgcacgccgcggagcctggctacctggtcaccaaggtggtggctgtagacgcagatgtgagacacaatgcgtggctgtcctaccacgtgctgcaggccagcaagcccaggctcttcagcctggaatgcgcaccgacgaggtgctgacagctcgcacgatgggccacaggaaagcgactcgccagcgcctactggtcgcggtgcactgcggtggacagccgctcctctcgctaccgccacgtcaccaccactaccgcccctcgtcgccgacagcctgcaggagactctgccagacctcagcgatcactctgcaaagctacagcctgaatccaaaattaatttatatctggtgattgccttagctttaatttcctttttattcttcctgattgcattgtttgtgctggttttaaagtgccgaagaccccaaaatgatcctgtctgagtctttcccacggatgtctatcccgcgctaagccccaggtttctgggtaactgtagctctatgatgccatattcctaccaggtgtgtgcttctcctacgaatccagggctgagtgaacttcttttttgaatccctacccctcaggactcaatagcagtttcactgcagaaagccccttggggaaggggatgattgtgattattctaattgcttgggcagaatccactctccaaggtgaaaaattcttgatgaaactaagttcagtcacaagcaggttttcttctagcattaaatattttcagagatctcagtaaaaagcatttctagcagcaagaccaaaggcctaagatgagaaatatttggcatggtgagcttgagggacagtagtcaggcagacaagagtatcagacatgccagagcatttggggcctgtaggtaaggagcatgttttgattatatatatttgtatgtgtttgattatattttataattttactttgatattcaaattgtactgatccaaaaataagggagggacaaatcttggccattgtagtatgagagatgtaaatttacaactcagaatccctgcttatcacttctccttcagcacacaactgtttcattttctatttaagaaacttcctctcactgcaaaaagacattctggctgataaagttagcctataatttcagtaaatctaagaatatgactaatggaagttgccagacctaaactttgaaaattattgttccactgaagagcgtcttatgactgagtgttccagtctccttctcaagctgaaccttgcttttcaaaccagattaagaacactatcataagttatactgcattttatttccctacccatgtccactgcatcattctctatagtacaaagagcttgtctcgccaggcgcatctataatcttagcactttggggcgccaaggcgggtggatcacttgagcccaggagtttgagaccagcctggacagcatggcaaaaacccatctctacaaaaaaaaaaaacaaaaattaacaaggtttagtggtccatgcctgtggtctcagctacttgggaggctgaggtgtgaggatcacctgagtctggggagattgaagctgcagtgagctgtggttgcgctcctgtactccagtctgggtgacagaattagaccctgtcccaaaacaaacaaacaaataaagagcttctctccttatgacttatttaaagcttgggaaattgttccaattcaaatgctttaaatggacttgagctaaaacagaatgtggtatatgaaatgttcttataatcaggtgattgtaaaaattgatccagataatgttagcatagcattttactgaactagtagtttacaaacacttcaaaaattatagaataacatttgcatataaaattcctcatacatttccctatcagtgaattggaagcttacaatatacaatattaccaaaaagacaaaaaaaatgaaaaggaaacagttacctttggaaaacataattaggtaaaatgggtaatatggaaagtctgaaaactgaaaaaattactgataagtcaagagaaaaggaatattagtaggaaaattcataaaagtgtgtctgactactcacagcaggtttccttattggtatgtattctgtggtccatctaagctatgttaattttattttaaatgctacctgggtattggcttctaaaaggaattcagtaaatcagataatttggcatcttcaatctagattctgatgctcacctgaaaagtctgctaaggattggaaaccaagaaaagtgaagtatctcaacagatatgtgtcacttgtgtgtactggattttttttttttttttttttttttttttttttttttgagatggagtttcactcttgttgcccaggctggagtgcaatggcatgctctcggctcactgcaacctccgcctcccaggttcaagtgattctcctgcctcagcctccctagtagctaggattacaggcatgtgccaccacgcccagctaattttgtatttttagtagagacggggtttctccatgttggtcaggctagtcttgaactcccaacctcaggtgatcttccctccttggcctcccaaagtgctgggattacaggcatgagtcactgcgcccggtcgcgtactggatttatattgtgtaatactttgctctagcagtatagtaggtgagacagtgactgtgtctagtgagcaaaaggcacttatttgacacttttgactcttcctttctacttaccttatttaaaattgatttttgcatgtggcatgatgcaccagttcattgaggtaggggttgaagttatttcccatttttttcaataccatttattaaaaatattttcctctttctgttgaatttgcttggtgcctttgttgaaagtcatttcactgatatatgtagttctatttctatattcttgatcatgtttcatttgtctattcttttactaatagcacactgtctcaattattgtagctttatagtaagtcttgctacaaagtcttactacaggacaaagcttgtaggatttttgaatgggatggcattgcatctatacctttatcagggaaagagggaaggagggaggaggatcatcttaacaatattgacacttcaaatccatgaacatggtatatatttccatttaattaggtctttaatttctctcagctatgttgtatagttttcagtgtagagaggtcatgtatatttctcattaaattgtccctacatatttgatgttttctaatgttattgtaaatagtatttttaaaattgtatcttctaattgttcatttctagtttacagaaaaatgaaaaactatgtttttatgtattctatatgcttttgaaaagtaagaggtgcaaagtgctctattcttacactatattgtgtgagaatataagtcgaaaccactctgcataagttcaggcttccattctcttcagtttgtaggttgagagaacccatccagaaacagtaaacattggtgtctgcccaagtctggtcctgggtggttcattcattcatttacataacaaatatttattaactgtctgctatatgcaaggcactgacctatggactaaggatgcagcaatgaacaaggcatatatgattcctgagttaatgggccctattctaatacatgatattttacaggtctgataaaagccaacaaggagaaatacaaaagcactaagagaaagcttatagtagggaagcttcgcctaatctgaaggtcaaggaaggctttctttttttcggaaagtgatatttagagagatgaatagattaataggatgagtagaagttatctaggtaacaaggaaagtaaaaaagaaattgtcaggcagaggaaatagcatgtgtaaagatctttttaaaaaataaaaggtgtgactcaagcaatttaaaagggctagggaggctagaaacagaaaataaatagatgaaactaataaggcagggagagccttgtaaatcacacttaaaattctggattttgttctaaatacccttgtacttaggagctattaaaatattttaaacaaggcagtgacaagatatttgaattattaagcttactctggctgctatatggagaattgatttatgagggttataaatagaaataggaagataagataggagactatggcaatattcctggtaagaaatggaagaagagctggcttggattaaaggggaggcagtggatgtagaaataaatggatgaattatagatatatttaggaaatgggttcaataagacttaataatggaataggtggaatataaatttcatgagggcagggggtgttttgtttattattatattcctaggtgtctgaaaatattgttgtgttgcctggcaagtggtagatcttcagtgaaatattattaactgaataaatacaatggataaatggggagcagggattaagagtgattcctgggtttccacattaaggaactggatggacaaagctaccatttgatgagaatggaagactaaagaatgatagatttaagagaaatcgagttgagttccagccatgttcatttgaaggatctgagaaacagtgcagatattcagtgtgtgattagacatatggtcatcattcttttttttttttgagatggagtctcgctctgtcacccaggctggagtgcagtggccctatctctgctcactgcaatctctgcctcccaggttcaagtgattcttctgcctcagcctcctgagtagctgggactacaggcgtgcaccaccacgcctggctaatttttgtatttttagtacaagacagcatttcaccatattggccaggctggtctcgaactctgatctgcccgcctcggcctcccaaagtgtggggattacaggcgtgagccaccgcgcccagccggttaccattcttttactctgagttcttccattgtgatcatctagtcagatgggtagatccttataaggctgagcataataagcttcctgatagctctacactggtatgttttggggttcatggctgagctacttttgtgttttatttatcttcctgatctctttttcactgtaagaaacatccagcacccagggaaatttgctgtctaattcatactccactcttcagactagtcctagtgttcagttttgttttgttttttttctgtgtctggaattctattaaaatgtgtcaggctgttttaatttttgttgtttaattttctttcacatgattatatgtgctccatggatttttttgtttgtttgttttttgtttttgtttttgtttaagcggggtcttgctcttgtcgcgcaggctggagtgcaatggcttgatctcggctcactgcaacctccgcctcccgggttcaagtgattcttctgtctcagcctcccaagtagctgggactacaggcacatgccaccacacccggctaatttttgtatttttagtagagacgggtttcatcatattggtcaggctggtctcaaactcctgaccctggtgatctgcccacctcggcctcccaaagtgctgggattacaggcgtgagccaccgcacccggaggaaatttttaacctcagtttttcttcaccatctgtaaaactgcatagaaggaatgtttaggataaaagatgcataacaatcataacaaaattgttgggttttaatgttatgagtacacttggaggattctatgtccacacataccttaaacatcctatagagtccttagcattttaaagttgaaaccaacagtatgaatgatggtagaattttcccccccaggaagttagaactgttccatatcttgatagagggatgggttataaggatgtacacattttccaaaactcattgaacttaagagtcttgcatgtgactgtatataaattatactttaattgaaaataaatttaagaaaataaaattggctgggcgtggtggctcacgcctgtaatcccagtgctttgggaggccgaggtgggtgaatcatctgaggtcaggagttcgagaccagcctggccaacatggtgaaactctgtctccactaaaaatacaaaaattagctgggcatggtggcggacacctataatcccagctactcgggaggctgaggcatgagaatcgcttgaacccaggaggtggaggttgcagtgagccaagatcatgccattgctctccagcctgggcaacatgaacgaaatgccatcttaaaaaaaaaaaattaaaagaaaagaaaattagcctcccccaccctcactatacctcagactcacccctgaaagatcactactattcatccctggttatgtacacttacaaacattttctgtgtgtatgcgaatgtatgtgtggggttttctttgcacaacaggatcattttacagtatatatactgttgtgcaacttgctctttccacttaatatctcaaggaatcttttctttgaatctttatagccatgtacctcaatcttagtagttttctttattttatttttgaataggaaatacatttacatggttttaaaaatcaaaacaatatactatgtatatattgagaagtctgacttccatccctatcctactcctattccacccttgcttcctcctgtcccctgtaggtaaacattttataactttattaagcatcctgtcagcatttcttatgcaaatatgtacatatatttttatttccccattttttttacaaaaagataaaatactatacaccactttatatcttcctttcttcacattatatcctttaaaaatatttccatattggccgggcgcggtggctcacgcctgtaatcgcagcactttgggaggccgaggcgggaggatcacgaggtcaggagatcgagaccatcctggctaacacggtgaaaccccgtctgtactaaaaatacaaaaaaaaaaattagccaggcgtgatggcgggcgcctgtagtcccagctactctggaggctgaggcaggagaatggcgtgaacctgggaggcggagcttgcagtgagccgagatcgtgccactgcactccagcctgggcgacagagcaagactgcaactcaaaaaaacaaacaaacaaacaaaaaagaacttccatattaatatatagaaagctgttttttttaacagttgcttagcattcctttggattattaaccagtctcataaatgagcgctattgaatagccctgtacctacatcagtttttacatatgcagtatatctttgggatgaattcccagaaatggaattgaaattgctgggtcaaagaggaaataggtgtaattttcttaggtattttcacaagaagtgttaattctaactttctgttttgaaatgatttcaaattttcaaaggagttgcaagaattgtacaaagaactgtatctccttcacccggatgcaccgggtgaattatatgtattatataattgtatctgtaggccaggtgcagtggctcactcctgtaatcccagcactttgggaggctgaggcaggtggattacttgaggccaggagttcaagaccagcctggccaacatgataaaactccatctctactaaaaatacaaaaattagccaggcctggtaccccatgcctaagggtgaggcatgagaaatgcttgaacctgggaggcggaggttgcagtgagccgagatcgcaccactgcactccagcctgggcgacagagcaagactctgtctcaaaaaaaaaaaaaaaaaaagtaaaaaagttttttaaaaagatgtatctatatatacatatttacatacacacccaagtgtgtatgtatatatgtttgtgtgtatgtacacaaacacattatttttatatgatatgatttttttatgacatgattatttttatgacatttgagagtaagttgtagaaattatgtttctttattcctaaatacctcattgtgtatttcctaacaaggacattcttttatataattaaattttaataataaaaatcagaaaatttaacatcaatgcaatataattatttagcctatagtccatatttaaattctaccataccttatagtatattttactatacctcatagtaattttttttagtccaaaatatcacacattgcatttagttgccatgtctcttttttttttttttttttgagacagggtctcactctttcgcccaggctggaatgcagtggtatgatcttggctcactgcaacctccgcctcccaggttcaaatgattctcctgccttagcctcctgagtagctgggactacaggcatgtgccaccacactcccaccacacccagctaatttttgtatttttagtagagacaaggtttcactatgttggccaggctagtcttgaactcctgacctcaagtgatctgcccacctcagctaagtgctgggattacaggcgtgagccaccatgtgtggcctagttgccatgtctctttaatctactttaatctgaaacagttcctcagccttgtttgtttatatgaaactgacatttgtaaagactagaagccatttgtcttgtataatgcctttaatttatatttgttttatgtttcctcgtgattttatatatagagtttgtttgtttgtttgtctgtttgtttgttttgagatggagtctcattcttgtcacccaggctggaatgcagtggcgcagtctcggctcactgcaacttctgcctcccaggttcaagcaattctcctgcctcagcctcctgagtagctgggattacagatgcctgccaccatgcctggctaatttttgtacttttagtagaaacggggttttgccatgttgcccaggatggtctccaactcctgacctcaggtgatccgcccgccttggcctcccaaagtgccgggattacaggcatgagccaccgtgcccggacctcatgattgtatttatttatttatttaatattattattattatttttttttttttgagatggggtcttgctctgtcacccaggctggtgtgcagtggtgcgatatcggctcactgcaaccgctgcctcccagattcaagcaattctcctacctcagcctcccaagtagctgggattacaggcatgtgccaccacacccggctaatttttttgtattttttttagtagagacgaggtttcaccatattggccaggctggtctcgaactcctgaccttgtgatccacccaccttgacctcccaaagtgttgggattacaggcgtgagccaccacacccagccttatgattgtatttagactagacatttttttggtagtatattatttagccattgctgtgtaacaaattatcccaaaacttagtggcttaaaagaagcatttattatctcataaattttgtggatcaggactgggtatagctttgctgagtgcctctgcctcaaagtcttacaaggcagcaattaaagtgtcacctaaggctattgtcttatctgaagggtcaacagaggatggatccgcttctaatctctctcacatagttaatggcaaaattaagttccttgtggattgttagactaagggttccagttccttgctggttgttagcttgaggtctacctcagttccttgccatgtggacctccatagggcaaccagcttctgttagagcaagtaaaggagagtgccagagagggcaaatgtgatgaaagccacaatctttttataaacctaattttgaaagtgacatacaaggctaggcatggtggctcaaacctgtaattccagcactctgagaggccaaggagggtggactgcttgagcccaggagttcaagaccagcctgggtaacatgacaaaaccctgcctctactaaaaatacaaaaattagctggtctggtggtgcatgcctatagtcccagctactcaggaggctgaggccagagaattgcttgaacccaggaggcggaggttacagtgagccgagatcacaccactccactccagcctaggccacagaatgaaaccctgtcaagaaagaaaggaaggaacaagggagggagggaggaaggaagggaggtagggaggcagggaaagaccgagaaagtgacataccatcatttttgctgtagtttgttcattagaagcaaaatcacttggtccagcccacactctggggagatgattttctaactccatttgtaataacttattctacttttattagttggcattatacagtaagaaagagctttcttttctcttcttatttattcatatatggctcatgtgttttttccaatgagttatattctattactaacattttttattttgacctcaaattgttttagatgttaccaataagaacctcttcaagctggttcttgtgtccttttgccataactctctcattttcttgaaccctttcttactttctgatataagaaaatattagagactcatactttccttgttccagttctgagatgaaccatttatccaaaagccttgcttcattttagtagggaatagtatttagaaactaagatctgggtgtgaggtatgctcactgctaatgggctgtcactgtttctaggccttgtcagcagacggagctaggaaaaacacacataaacacacccatatttatatttgtacacacactccctcaaaatcgtgagttcatattgatacctccagttctggttcttcctagccttccccctttccatctttgtatttttattttccaacagtaagaaccctggctcccagtgctatgaatatatttactcatttgctccatccactgcactccagcctaggccacagaatgaaaccctgtcaagaaagaaaggaaggaatgagggagggagggagagaggaagagagagaaggaagaaggaagggagggagggaaaactgagaaagtaacataccatcatttttgctgtagtttgttcataagaagcaaaatcacttggtccagcccacactctggggagatgattttctaactccatttgtaataatttattccacttttattagttggcattatacagtaagaaagagctgctgaagatttgcttgcaattggttgtctttaaactgagggtatattgtcaaagtactgtgctgaaaagttacctgtagtatagttatgtgattcattaaaataaagtttgtttctattatgtgcagttttagagttttgccacactctggttgattagtatattttctgttgcttttttgttttgttttgttttgttttgtttttgagatagggtctcgctatgtcacccaggctggagtccagtggtacaatcacagctcactgcagcctcaacctcgtgcacttaagcgatcctcccacctcagcctcccaaatagctggggctgcaagtgcacaccaccatgactggctaattttttaattatttatttatttatttatttattttagagatggggtctcactatgtttccccaggctgaccctgaactcctggggtcaagtgatcctcctgccttagcctccaagtgctggtattacaggcataagccaccacacctagcctagtattcttttttgaatatgtaaaacattaacataaagtcaaaactattaaaaaaaggtgtactcagaaaattgtcattcctcccctataccttctgcctcattcacaccacactctgtagataatcgatttcattagtttgtggtttatcctcactgtgtttctttttgcaaaacgcaaaaacaaaacctatacatatttatattttcttatgtcctcttctttcttacacaaaaggtaacacactatgtaggtagtcctggctttgaacagtttcactataaaaatatttgttactacagcttaaataacataagtctcctaaaaataattcaaattttagttaccatggtatattaactttgagtagttccataaaggacaaacttggctgctagcccttcagtccacagagcactttgaaaataacagatgagcaaaataatgtggccaatcacatgacttctttcaaagtatgtcagtgatcagtcactgtgtgcctataatttagttcatgcacagacagcaaagcatgtagttgtgttgccttccagtgataaacccacataacattttagaaaaatgtattaagaattggccagcaaagataaaagtgcagcaaagaaacaaaagtgataatgttttcagtgaaatttgaattgaacataaatggagttatagaagaaatagctgaccatgggaatgttcacactgctactttcaagaatctctagaagggcagctaaaggagcttagtgaaggtgaatttattgacatgaatgagaaaagtaattgtgatgaaaaggatgaagatgtcccagagaaagtaatgccagcaaaaacttcacattaaaggaactctcagatatttcaaagcattgaaacctccaagaataaataaaatgttggaagttgatccaaacttagaaaggagtatggcaacttgtcaagatgaagaaaaggtgcttattcctttttatttatttatttagagacagagtttcactcttgttgcccaggctggagtgcaatggcatgatctcagctcaccgcaacctccacctcctggattcaggcagttctcctgcctcagcctcccaagtagctgagattacaggcatgtgccaccacgcccggctaattttgtatttttagtagagacagggtttctccatgttggtcaggctggtctcgaacccccaacctcaggtgatctgcccacctcggcctcccaaaacactgggattacaggcatgagccaccatgctccacctgcttattccatattatatgttataggatgaaaagaggccaaactaatcttgacatgttttttacaaggaaataatcctccatggttctaatttttttttttttttttttttttttttttgagacagagtcgcgctctgtcacccaggctggagtgcagtggcacgatcttggctcactgctagcaccgcctcccgggttcacgccattctcctgcctcagcctcccgagtagctgggactacaggcgccggccaccacgcctggctaattttttaaaaaatatttttagtagagacggggtttcaccgtgttagccaggatggtctcgatctcctgacctcgtgatccgcccgcctcggcctcccaaagtgctgggattacaggcttgagccactgcgcccggtgggtctaatgttttaaattacactgtgttaaataaatattagtttgttggttttttttttagtttttttatttctctacaaatttacaaccaataagagtttttaatgctttgacaaaaaatgttaaaggtcatagtacaatcgcatttcttcccattgattattaacatcactttacatagtttcatcttgcattagcaattttgtgtgtgtgtttgtggttttaaggagcggagagtttaataggcaagaaggaagggagaagacagaaggaaggagctcccccttacagagacagagggagcggggctccaaaagaggaggtccccatctaccgcggataccagccaggtatatatgcagaggctggtggaggtgatgtctgatttgcatagggctcaggggattggtttgaccaggcatatcattcacgtagcccgagaaaaagctggccctcccaccccagccttttaatatgcaaacgtagggcgccatggatgttctaaacacgtggagatatgtggggggcagccatgtggccaggaacttgtggggcaagggcaagaaggctgtgggaatcgccaagttgaatggacctagtttctaatggcctgcatttgcatatcaaaggttgctggcctggctcctagagccggggctttaaaagaaacttttccggagatgctttaaaaaatgaaaacttcccaaggaccccttttcctgtctatctgcataaaataatttcttttattatttatttatttatttatttatttatttatttatttatttatttatttattttgagacggagtctcgctctgtcgcccaggctggagtgcagtggcgcgatctcagctcactgcaagctccgcctctcgggttcatgccattctcctgcctcagcctcccgagtagctgggactacaggcgcccaccaccacgtccggctaattttttgtattttcagtagagacgggatttcaccgtgttagccaggatggtctccatctcctgacctcctgatccgcccgcctcggcctcctaaagtgctgggattacagaataatttcttaataactcctaccacattcctccctgtggcgatatcaaactaactgctgttaggaggctttgggcgaccattgcttctggctacttcctgctgaaaaggggcgtctaatggagaacagcagctagggctcctcctggggttgatctaagggtcctcggaagaatggcgtccatgtgtggttcagtttacagcaccgtttggagtttgattgcttctaggcgagaagaaacaattcaagttatagtattgagtatacagagtccaaatatcaatacaagacatataagcaagagagtgcttaataaaggggttaaccaattccataaagaagactggaagtaattaaagagggattgtagccactcggggctgaagcccacattttccctgagcctgtcaataattttgatttgatttttaagtccctgtagatttgcctcttctttactacaggtgttaatcccaaagaagcatgtttcatttaaaaatgcattactggccaggcgtggtggctcgcgcctgtaatcccagcactttgggaggctgaggcgggagcatcatgaggtcaggagtttgagaccagcctggcctacatggcaaaaccccatctctactaaaaatacaaaaaattagccatcgtggtagtgggcgcctgtaatcccagctaattgggaggctgaggcaggagaatcgcttgaacccgggaggcagaggttgcagtgagccgagatcgcaccactgcactccagcctgggcaacagagcaaaactccatctcaaaacaaaacaaacaaacaaacaaacaaaaactgcattactaaatccaataaaaagtcctagtagactcagtgatagtaaaactttcatgcttcctttttgccagtaactattatccctgctataaggatactaattaagcaaaatacgacagcaatggaaactctgtccaatatttcagttagaaggtgctaccatggataaccctattgcaaatagtagagtgaggaaagcagttcccacaaatgtggtgtggtaggtaatttccatctaaaattttacttgccaacatatagaattcccctctgtgggcctacgaagttccttggttttattttcccaaacaaagaaacctccgggttacaggtaccttacttactttcattacctggcacaatttgcaaaataattgcccagaactagcatattgattcacattttcacattacccatccctttttcccccccaccaagctgcagaagatcaccacttgattcacaggaataagcagggccagggttagtctaaaatgtaggcaaaaagcttaaaaacaattaatgagactagggtttaatgacaaatgtatgataagctttggagcaaaatttttctctccagtcctcatttttggtaaaaactaattatgaatgaactttaatcttatacttggcctgattatttgcatgaagtgcagcaagaatggttatttctacataggacttttggattggctttgatgaaacactgttccacaaggaatttcagattagacttttaaagctgagcccagacatgggtttgtatcctctaatacctgtgagttgggttatcctctcctcttgaggtcccaagataaactcagagcttccagacctgttagaaagtgacattcttcactgaccacaggttaggaaccctgtgtggggactgtgtagacaaggtgtgaggccagttctccccaaggggcttttattggctctgcatgtcaagcttgattccttaaagggaaacacaccctttcagttaaagccttggcaaaataaccggtttttccaattgtgttctgttgacaaagaaaaatggattcttgctgcactgatgcgaacaactatattgccgtaagttaagagtacttacagatagtctccaaattttagaggaaccaggcagagaaaaatgaacatgctccaaattttgttcacagtagtataccttacttgattattaaaggccataaatagtttaaaataagtttcctttcccagtccatgcaccaaaatgatacggctctgatgagtggaggaacaacagggttcctggtcctcatgctggtttagataaaatgacacagacacatgtggagtggttttaaggagtggagagtttaataagcaagaaggaagggagaagagagaaggaagacgctcccccttgcagagacggagcgggggttccaaagctgaaagaggaggtcccccacattaacaatttttaaaataccgtacaactgcagaaaatgaggactgcctgtacatactgtttgacactttgtttttttttttaacttatcaactttattttgtttgtttgttttggttttgggtttttgtttgtttgtttgttttggagacgagtctcactctgtcagccaggctggagtgcagtggcacaatcccagctcactgcaacctccacctctcgggttcaagcaattctactgcctcagcctcccgagtagctgggattacaggtattcgccaccacatccagctattggttttggtttttgagacagggtcttgctgtgtcacacaggctggagtgcagtggtgtgatctcagctcactgcaacctctgcctcccaggctcaagtgatcctcccacctcagccttccaagtagctgggactacaggcatgcacaccatgcgcagctaattttttctattttttgtggagacggggtctcactatgttgcttaggttggtcacaaattcacagcctcaagcagtcctcctgcctcaccctcccaaagtgctgggattacaggcatgagccaccacatccagccttaccagctatattgaagtataatttatataacataaaatttgccttttaaaattatacagtgcaatgcattttgacaattgtttacatctgtgtaaccaccatgcaatcaaaatatagaacatttctataaccttcaaaagttccctcatgcccctttgcaatcaattcactacttctccagctccaggcaacaactggtctgcttcctgtcactataaattagtgttgcctctttcagaatttcatctaaatggaatcctataacatatactattttgtatccatcttcttttactccaaagttcttgaaattcattcatgttcctgtgtgtatcagcagcgtgttccatttgattgttgagcagtattgcattgtgtggatatatcacaatgtgttcattcattcaactgttggtggacatttgagttgtgtccagtttagtgctattctgaattaaagtgatgtgaacaatcatgtacaagtatttttgtaggcatattttttttatttctcttggataaataccccaaaacagaattgttttgggggtcatatgaaatgggaagtatatgcttaactttataagaagctgccaaactatttttcaaaatggtaatatcactttacattttcatgagcaatgcataaagcgttccgcttgctacattttctcaccaatgcttcctattgtcaattttttaaattttagcaattctagtgggtgtgtgatactatctcattgaagtttcaactgtttttccctgttgactagagacactgagcaacttttcatgtgttgtctatttgtatatcttcttgaagcattcgttcatctttaactgagctgaacgccttcttaaaattgagctatgggagttttaaaatatatccttgtagctgggcgtgatggcaggtgcctgtaatcccagctactcaggaggctgagacaggagaatcgcttgaacccaggaggcggaggttgcagtgagccgagactgcaccactgcactccagcctgggcaacagagtgagacttcatctaaaaaataataattatacatgtaattatatatgatttttatatatgtaatatatatattcttgatgtgagctctttgtcacatacatattttgtggatattttatcccagactatgacttgtcttttcattttcttagttgtgtcttttgaagagcagaagatgtaattttgataaagcccaatttattttttcttttatagtttgtatttcttatgtcctattcaaaaactccttgcctactgaaaacttatgatgattttctcctatattttcttttagaagttttatagttttaccatttataatttggtctatgaatccttttgagttgatgtttatgtatggtgtatggtgtgaggtaacaatgaagattcatatttttttccaaaggaatatccaattgtctctttggaaaaatatgctgagaaggctatcttttccccaccaaataatcttagcaccttaatcaaaaatcatttggccatggacatatgtaggtgtgggttttttctgggctctctgtgttagatggatagatagacagatacagatatataactgtgtttacacatatgtaactgtaaacacagttatatatctatatatccaccaacagttgaatgagaataaactattgttataagcatatatacacattgtatatatatgtgtacatatacatattgcatatgtatgtatacatatatacacacaaagtatatatatgtatgtatacatatatacacacttaaagtaatggcctccagttcgatccaagttgctgcaaaggacattatttcatgccttttcgtggctgagtaatattccatggtgtatatatatatatgtgtgtgtgtatatatatgtattatgtatatatatatgtgtgtgtgtgtgtgtgtgtgtatatatatatatgtgtatatatatataccacattttctttatccactcattagtcgatggggacttaggttggtttcacatttttgcaattgtgaattgtgctgctataaacatatgtgtccaagtgtctttttcatataattacttattttcctttgggtagatacccaatagtgggattgctggattgaatggtagatctgttttttgctctttagagaatctccatactgttttccatagaggttgtactaatttatattcccagcagcaatgtgtaagtgttctcttttccccacatccacaccaacatctattgttttttgactttttaataatggccattcttgcaggaccaaggtggtagctcgttgtggttttaatttgcattttcctgatgattagcgatgttgagcattttttcatatgtttgtgggccatttgtataccttcttttgagaaatggctatttgtgtcctttgcctactttttaatgggattgtgttttatttttcttggtgatttgttagttccttgtagattctggatactagtcctttgtcagatgtgtactttgcaaagataatattttggatgttatatttccattataatttagttcaaagtattttctaatacaccttgcaatttcttctttgacccatggattattttaaagtttgttattttgtttgtttattttgagacagagtttcactttttttgcccaggctggagtgcagtggcacaatcccggctcccagattcaagcgattctcctgcctcagcctcccaagtagctgggattacaggtgcccaccaccacacccagctaatttttttttcttttttttttgagacagagttttgctcttgttgcccaggctggagtgcaatggcacgatctcggctcactgcaacctctgcctcctgggttccagcaattctcctgcctcaacctcctgagtagctgggattccaggcatatgccaccacgccaggctaattttgtatttttaatagagacggggtttcttcatgttggtcaggcgggtcttgaactcccgacctcaggtgatctgcccgccttggcctcccaaaatgctgggattacaggcatgagccactgcacccagtccaattttttgtatttttagtagagatggggtttcatcatgttggccaggctggtcttgaactcctgacctcaggtgatccgcctgcctcggcctcccaaagtgcagggattacaggtatgagccaccatgaccagcctaaagtgtattgtttagtcaccaaatatgtaagtattacccaaatatatttgtcactgatttctaatttaattgtattgtgatccaaaaatatacattgtatagtttctattcttttaaattcgttaacatttcttttatggcacagaatatggtctatcttggtgagtgttgcttacacacaactgtgtaactgaaaactgtgtattctgcttctcgtggttgttgtatcctataattgtcaactagatcaagttagtaagagtgttgttcagtgatcttttcttcttcagtgtttactgtatttgctaatcccatccagtgaagtttccatttcatatattgtatttttcacttttagaagttccatttgactctttcatttccatcctcaattatcttcatatttttctttaaatttttgagcacatttataatggaggttttaaagtccttgtctgctaattttgtcacctctgtaattcctatgatgattttcttcctggcttggggtcataatttgttgcttatttgcatgtctaataatgtttttattggacagcagacattgtaaatgttatatttttgagtgtttggattttgtctttctttaagaactattgcagtttgttttggaaggctattatgttttttgcagatcaggttgatcttttcaaggcttgtttttaagctttgttaggacaggtctgtagtaacttttgccttgggctaatttagacctaccacttaattctgacttttttgattaatctgagtgttcagcagggtctctttattatggctaaatgaaattcaaacattttccagccctatgtgaccatcaagaattcagctaatagctccctggcagttcttcgcccagctgcagaaaagtgtcagtgcactctatgtatgctcagattattatttagccaaagacttggggatccatattaatattcctggagttctttgtgtagctccattctctttagtactctatcccataaattctggctgcctcaatctcctaatctccccaaactctaatatctattcctcaactcagcaaaaccatggtgttattcttggatttcccctttcctgccccacagtctgaaagttgtctccaggcaaaaaaaatggagatcctagtttgcggatcctcatttccttctccttttttttttttttttttttttttttttgagatggagtctcgctctgtcacccaggctggagtgacgtggcgtgatctcggcttactagaaactccggctcccgggttcatgccattctcctgcctcagcctcccgagtagctgggactacaggtgcctgccaccatgcccggctaattttttgtattttgtttagtagagacggggtttcaccgtgttagccaggatggtctggatgacctcgtgatctgctcacctcggcctccaaaagtgctgggattacaggcatgagccaccgcgcccggcctgcttctcttctcttatgggttagaatcctgcactgtcttttgaacaaatgtctaaaagcttttatcacacattttgatccacttcccagttgttatagtggtatatctggtttcacatgactgaaaggaaaagttttcaccttgctttttgtactaataatatatcctggaaatcattctatataaatttatagaaatcttcatttttaaaatagcttcataaaactccattgtaaaaaccaggtgcagtggctcatgcttgtaatcccacactttgggaggccaaggcgggtggatcacctgaggtcaggagttcaaggccagcctggccaacatggtgaaactccgtctctactaaaaatacaaaaattagctgggtgtggtggtgggcgcctgtagtcccagctacttggaaggctgaggcaggagaattgcttgatttcaggaggcggagattgcagtgagctgagattgcgccactgcactccagcctgggctacagagcgagactccgtctaaaaaaaaaaaaaagcaaaaaaaaaaactccattgtatgtgcacatatcattatctgttcaacccatctatgacttgtcatttaggtagtttccatccaatatttttgcaatataaaaaatgctaatgaagaacctgagatatatatatatctatatatatagatatatatgtttgttgttgttgttgttatttttgaagtatgtacgtataataaattcctaatagtgtgattgctgcatcataaggtaaaggcatatgtagttttgttaaatatagctattccccatcttgcattcctacaaatagatgagaatgtccattgtcccatagtctcctttgcagagtatattgtcaagctttttaattgttgccaacctgatgggtaaaaagatatctccaaataattttaattaaaatttctcttattatgaatgaggttaaatagtttttcatatgtttaaaagccagtttatatctttttgtttttttagagacaggaatcttgttctgttgcccaggccaaattgcagtgatgcagtcatagctcactgtagcctcgcactcctgggctcaagcaatcctcctaccttagcctcccaagtagctaggactacagatggatgccaccatgtccagctaatttttttatttttttgtagagatgtgaggtctcactatgttgcccaggcttgtcttgaactactggcttcaagtgatcctcccacctcagcctcccaaagtgctaagattacagccatgaaccaccacaaatgaccctatatatttttttgaattgtctgttcatgtcttattttcatttttctagtagttttttttttaagtgttttagcctaaatttgtaaaaagtttaggggatatatgaagggactctaaatgtttatgaagaaatttaattaaaagataaaaataaaaatataagctttatttttcaacatgagctccatcaagttcaaggcacttttgtaagcaatgatactagccatttagttcacccctaaagaactgagagtcctgggaatttagccatgtcaatgcagtattttttatattggttactgaagaaaaaatgggtgccctttaaagttgtaagattaggaacaaaaacaagtcagaagaagccaaatcagcactgaaaggtgggcacttaatgattacccaagaaaactctcaccaaattgcccttgcttcatgagaggaatgagcgggagcattgtcgtggtcaggaaggattctggggaagttttcccaggcattttttctgctgaagctttggtaactttctcaaaacactctcataataatcagatcttatcactctttggccctccaggaagtcaaccagcaaaatgctttgaacatcccaaaaaagcgcttgccatgacatttgctcttgaccagtctgcttttgcattggtcaaatgccaccacttccacctcttgtgctttgttttcaggatcagactggtaaagtcatgtttcatctcttgttacagtttttttttttttaagaaacccttcaggatcttgatcacatttgtttaaaatttcaactgaggctgggcccagtggctcatgcctgtaatcccagcactttgggaggccgaggcgggcaaatcacgaggtcaggatttcgagtccatcctggctaacatggtgaaaccccatctctactaaaaatacaaaaaattagccgggcatggtggcaggcacctgtagtcccagctactcgggagggtgaggcaggagaacggcatgaacccaggagacggagcttgcagtgagctgatatcatgccactgcactccagcctgggcaacagagtgagactccagctcaaaaaaaaaatcaagtgaaaactctggtcttaaactgcagctgatctattttatttttattttttttcagacacagccttgctctgttacccaggctggagtgcagtggcaccatcatggctcaatgcagccttggcctcgtgagctcaagcaatcttcccacctcaggctcccaagtagctgggactacaggcacatgctaccatgcctggataatttttttgcagctaatctagatgtaatggttttggcacccatctaatggaaagtttgctcaactttaatttttcagtcagaattgtgtaagctgaaccgagatgtctatggtgttggctattgtttctgctgttaattgtaggtcttctttaattagagcacagacaagatcattttttttcctcccaaattgatgtagatggtcttttgctgtgggcttcatcttcaacattgtctcatcccttcttaaaacaagctagctacttgtaaactgccgttttctttggagcattgtctccataaacttttcacaaaacatcagtgatttcaccgttcttccactcaagcttcatcataaatttgatgtctgttcttgtttccattttagcagaattcatgttactctgataggggctcttttcaaactgttatcttattcttcttagtgcctcaaactagatcctattcagacatggtataacaagttagtatgggtttattttggtgcaagaaatattttgaaatccacacatttttttcataatatgcattttccatgaagtttttgaaaactccttgtattaggaatattagtcctttgtccagtaaacagactgcaaatattttctcacagctcatcatttaccttttggcatttttttgcaatgcaatttttttccctttgtttttgttttttgtgtaatgaatcaatgttttcttttttttttttttttagaccaagtctcactctgtcacacaggctggagtacaatggtgcaatctcagctcactgcaacctctgcctcccaggttcaagtgattctcatctctcagcctcccaagtagctgggattacaggcacatgccaccatgcctggctaatttttgtatttttagtagagatggggtttcaccatgttggccaggctggtctcgaactcttgacctcaagtgatccactcacctcggcctcccacagtgctgggattagagacgtaagccactgcccccggccaaatcaacgttttcttatattgcatttaggttttaagtcatagttagaaagcctttccccacacctaggttatagaaacattcattacttttttcttccagtgctagtacttgcatggtttttggtttccacatttagatccctgatctaattggagtttattcttttgtgtgctgagatatggatctgattatatcttttttcccaaatggctatccagttgtcccaatgccatttattaagcacttcatctttgtcccagtgatttgagatagcatctttatcatgtaccaaacttctatagtgccagaagatttttattttttttagacagggtctggctctgttgcccaggctggagtgtagtggcacaatcccagctcgctgcaacctccgcctcacatgctcaagtgcccgcacctcagcctctcaagtagctgggactacaggcacatgccaccacaccaggctgatttttatatttttttgtagaatgagatttcaccatgttgcccaggctggtctcaaactcctgagctcaagaaatccgcccacctcagcctcccaaaatgctaggattacaagcatgagccaccacacccggctgccagaaaattttaatgatcagaaaaccacaattctttcttcctctgttatatgttgaagtaaaatacttcatttagaaaactaagccgggcacagtggctcacacctgtaatcccagcactttgggaggttgaggcaggcagatcacctgaggttaggagtttgagaccagcctggccaacatggtgaaaccctgtctctgctaaaaatagaaaaatttgctgggcatggtggcgggtgcctgtaattccagctacttgggaggatgaggtaggagaattgcctgaacctgggaggcagaggttgtggtgagccgagaccacgccattgcaccccagcctgggcaacaagagcaacggtaaactccatctcaaaaaaaaaaaaaaaaaaagaaagaaaaaagaaataactcagccatacaaggctacccatttggtgagaactaataataagttagatagcaaggtaatagcaaaatgtgggtgcaaaattaaagcaagttatttctgaggagaatgtaggtctcatggaagattttcatgtggacaaatttagtaaattttttgcaggtagtttcctgacatatttaacatttgtgatatagtaaacaataagaaggtactaaaggctgggcgcggtggctcacgcctgtaatcccagcactttgggaggccgaggtgggcggatcacaaggtcaggagatcaagaccatcctggctaacacggtgaaaccccgtctctactaaaaatataaaaagttagctgggcgtggtggcgggtgcctgtagtcccagctactcgggaggctgaggcaggagaatggcgtgaacccgggaggcggaacttgcagtgagccaagatcaagccactgcactccagcctgggcaacagagcgagactccatctcaaaaataataataataataataaggtactaatatgatccagactagaagagaatagcactaaaatgggagatggggtaaacctgtggttttttttaccttaggcttttgacttccaaaattattgtttttgctgggtgcggtgggtcactcctgtaatcccagcactttgggaggccaaggtgggaggattgcttgagcctaggagtttgagaccattctaggcaacaaagcaagaacctgtctctaaaaaaatttaaaaattagccagaaatggtggcacatgtctgtagtcccagctacttgggaggctgaggcaagaggattgcttgagccttttgaagttgaggcttcagtgagccatgatcaccccactgcactccagcttgggcaacagagcaagaccccatctcaaaaaataaaacaaaatagactgggcacgatggctcacgcctgtaatcccaccactttgggaggctgaggtggatggatcatgaggtaaagagatcgagaccatcctggccaacatggtgaaaccccgtttctactaaaaatataaaacttagctgggcgtggtggtgcacacctgtagtctcagctactcgggaggctgaggcaggagaatcgcttgaacccgggaggtggaggttgcagtgagccaagattgtgccactgcactccagcctggcgacagagtgagactctgtctctaaataaataaataaataaaacaaaataagtaaaataaaataaatgtttgtagttccaaaatattttgatgacataatttcttcttgttctaataaaactacatatgcattggtcctatgacctagtaatcacactattaggaatttatcataaatacacacctcaaaaattacaaaaatacatatataccagcttatttattacagcgttatttgtaattgcaaaaacattgtagatagaatggaggtcacataaaacttattcttaagattcagaccgggtgcaatggctcacgcctgtaatctcggcactttgggaagccgaggcaggcagaccacccgaggtcaggagtttgagaccagcctggccagcatggtgaaaccccatctgtaccaaaaatacaaaaattagctggtcgtcgtggcacgcctgtaatcccagctactcgggatgctgaggcgcgagaactgtttgaaccccggaggcagagactgtagtgatctgagatcatgccactacattccagtctgagcaacagagcaagacttcgtctcaaaaaaaaagatcatagatcatcttatcaaatcaaagtatgcaaaatattcaagtaaacttcagataaatatgaaggctaaaccattcagcttcttcaccaaacccttgaatgtcccacctgtctaaatggagatacatgtttgtttgatttattggttaactgtttttattccatttttcctcaaatgatcccataatttgaccttaggaagctgttcaaatagacacattaggttgaatggaaagactactcgatgatatttaggattttaagaggattttatgtattttttccttgtgtgcaataatttaatagcatcttgaataggattttctgatattactaaccctctgggaataatattaggtaattagacagttagctaatattaaaatatgtatcaggtaatatttattgagagtttcctctgtgccaagcaggatcaacttcataggcaggcgacctgtgcggggacacagggcttcatgcttagataggcccccttgctttgaaggcccctaccctttggttagggctctgctgttaccatcttgaaattcttaataatttttattttatttttttgagtcagggtcttgctctgtcgccctggctggagtgcagtggactcactacagtcttgaattcctgggctcaagcaatcctcccacttcagccttctgagtagttaggacgacaaacacacgccaccatgctcagataagttttttgtttgtttgtttttttgtttttgtttttgttttttgtagagatgggactgtccctatgttgctcaggctggtctcaaattcctggcctcaagtgatcctcccacctcagcctcccaaagtgctgggactacaggcatgagccactgtgcctggtcaatcatttttattaacaagcccaagccctcttttttttttttttttttttgagacagggtctccctctgttgtccaggctagagtgcagtggtgcgatcttaccttcactgcaacctctgcctcctgggttcaagtgattctcctggctcagcctccctagtagctggaattacaggcacccacccccatgcctggcaatttttttgtatttttagtagagatggggtttcaccatgttggcaaggctggtctcaaactcctgacctcaagtgatccacccaactcggcctcccaaagtgctgggattacaggtatgatccactgcgcccggcctccaagccccctatttttattttgcactgaccctacaagttacgtagctaggcttagttatgtttttagcaaggaaagtgtataatctcatgtaccttttgaaagattactcaggtctctgcatgtgaaatggaatttagggaatgcaagagagggagtaaaaataacagcgaggaagctatgatagcatttaaggttgctttgactcaggggtagcagtagatagggtaagtaattgatagtttcaaaatatattttgggagtagtaagcattggtatggattagtaatatactggatgtggggatgcagaaaaaaatattaaaaattacttctgaaattctggctggaatagaagtgccacttaccaggtaaggaaggttggagacataacatatttgagggtgtggtcaaaagatgagtttgacattatgctatgtcatataaaagacatataaaagactacctattttataattcctttttaataaaatattcagaaaaagcaaaactgtggttgcctgaggctgaagctaggaagattgactacagacaagcatgagggaaattttgggggtgatgagagttttctaaaactggattgtggggttggttgcattactgtataaatttattaaaaatccctgcatcgtataggggcactatattgtatgtagaaagctgtgaaaagattttaaaaatgattgacatgtctgtggttatatcaatgagtactattattattcccattttatacataaagaaaataaaagagaagttaaaaataaaagtttcatggttacatagctactaggtgtaatatccagtattggaatttgaatctttttgacactaagaccttactctcgatcatataatacattcactttctattttaaagttatattatagccgggcacagtggctcacacctgtaatcccagcactttgggaagccgaggcaggcagatcacgaggttgggagatcgagaccatcctggctaacacggtgaaaccccgtctccactaaaaatagaaaaaattagccaggcgtggtggcacgcacctgtatcccagctactagggaggctgaggcaggagaatcgcttgaacccagaaggcagagcttgcagtgagacgagatcgtgccactgcactccagcctgggtgacagagtgagacaccatctcaagaaaaaaaaaattatattataaatgctgcatctcattggtcagaagctctcttgaaattataaaacaaagaagaaaaaagataaagactgggaaattgtgttgaatcagtatataaatcctgtatactggtccttccatttcccctagaaataagtgatacaggccaggcgctgtggctcacacctgtaatcccagcactttgggaggcggaggctggcagatcacctgaggttgggagttcaagatcagcctgaccaacatggagaaacccccgtctctactaaaaatagaaaattagctgggcatggtggcacatgcctgtattcccagctactcgggaggctgaggcaggagaattgcttgaacccaagaggaggaggttgtggtgagccaagattatgccattgcactccagcctggggaacaagagtgaaactcaaaaaaaaaaaaaaaaagaaagaaaaagaaaaagaaagaaggaaggaaggaaggaaagaaagaaagaagtgatacaacaagttacagcatctttgtttattatccactgtgagttgtattaccacactttacttggctctttggcaaactatattatctcttcagatcactagggctaggaaggcccactggtaacttgaaggagtaaatgtatcttctaaaaaatgcttacttccagggagattggatccacacaagtgaatacatatatagtccttagtgtatgctatgattattttactatgtcagtagcataaagattgctatattaataagcattaagtgcctgctgtgctagacagtgaggatgcaagtggccaccaaaatagcatggtccctgccctcctggagcttctttttttcttcttcagtgggggaagcagatactttgcttatgcaaaaataattataaaatttaaagttgtgccaagttcaatggaaaaaatataaggtgttctgagagagcataacaaaggatcctggttttaactggggcctaatggaagacctctattaggaaataacatttaaactaagaccagacagacctgtagaaattagcaaagcaaagggagggaggaaaaagcagctttcctggcaaaggaacaatttgtgtgaaggccctgagacagggaagggctggggttctgaccaccctccaagtggtgcaatggaatatagtgagagagggagaagacatgagaacttggatactatgcaaaggatttggtattttaattcaagagcagtatgatgctactgaggagcagctggacaattgtgtgatccaattaaaattttaggaagatgaacctcgctattgtggagaatgcatacacaagggttctgttggttcatgaagaggtcttaagaaaactatgagctgggtgcagtagctcaggcctgtagtcccatctacttagaagtctgaggcgggaggatcccttgagcccaaggagctggaagttacagtgagctatgattattccactgtactccagcctggatgacagagcgagatcctgcctcagaaacaaaaaccaaaaaacaaacaacaacaaaaacaacaacaacgaaaatctcagaaaactacaggccttattatcaagaaaatgacaggccttattattgagaaaactacttacatttttaaaagctgattttcaaaaaccagattgtgaattaagtgatgctgaataggggaaaaaaagactgataaaccagtgtatctctgaataacccactagatcagtgcttgtcaaactttaatgtgttttcaaatcaccctgatgttttgttaaaatgtaagtcatgtctcagtaggtctagaggagggcatttctgcatttctaacaagctccccggtgatgcctagaccattggtcctcacactttgagtagcaagtgattgggctatactctttattctaaattctaaatgtattctatcttctaatgcctatcagccctcttgctggtctggctaattatcaaacttgagcatttaaaactgggggttttcagagattaattgaagtgttaaagacatggaaatataggtcacatatggcttttcatctcttccggaaatatcctatatatccttacttcttttctacctacctaacctatgtgcctaccccttcacttatgttcaaggttctattatacttcaaaaggactctatgcaatcaaagtgatgtccaagacaaatatacagaaatagtatgaggctctaacactttacatctaatggagtggtttgcatcattaattgaggcttactctgtgccaggcactttacctgccttcttcatttaataggataggagcaggaactcttagaggttcatttcttgttcaaggatatacatctcatctctggcttatatcacagtggactcttttattcactatcctaatcattataattttgtttggtgacaacaattctaaatgcagaaaagttaaggctctttattctgtgactaaaggctttgtattttctaaagatttgtggagctttgctgccattatttcaataattttataaagatcctaggtggtaaataggcctggctttttttctttttgaaatcttctccgtcttcttcttcattagcagtgcaacttcttgtggcatatggtacccaagatcttgggaaaaggattgatcaagtaaagggaaacgatagagagagtgtgctctacaactgagatcatgctccttgtgaaagacagggtagggaaatttcttattgctccctggttcttaagaaatgagagctaacaatgacatccagttttaaaagaaataaaatctgaattgtacttttaaattttataagccagagttaaaccaatagattgtaactcctgctaatttgatagtagctccagataatgaggaagtgacagggaatgctaatttcatttggtaagagataaaactgaaattattaatgtctccacggaaatgctaaatgcctccttacaagtagggtccggctaattgtctgtcttccaacaagccagatttgttggtgtttttccagacaatgttgtgtagttttcggtttggttcgatcccctttcttgtgatcaaagaaagtgattcaaatgtttaatgagtcttgatttggattggagacttgcagaacggctagcctcacagccccaaggctggctttccctaaggtaggtttcctatgcaccgatactggcaaggcgctttggctggaaactctggaaggaagccaaaggaaagtgaagttcctggcgctagcgcgtgtcctgctcagagagcccggcgctagctcattcttcgtgcagttattggctgggactctgtgtgccgctgtcggccaatgaagacgctggagatcgggcccctgcccgtcccctttctgcgccccgggatgaggcagagactgaacagccggcgagcaaatcaacggcatccagaaagccatgtcggactcggcgcccagcgcccaagcgctaacccgctgaaagtttctcagcgaaatctcagggacgatctggaccccgctgagaggaactgcttttgagtgagatggtcccagaggcctggaggagcggactggtaagcaccgggagggtagtgggagttttgcttctgcttggtgccttgaacaaggcttccacggtcattcactatgagatcccggaggaaagagagaagggtttcgctgtgggcaacgtggtcgcgaaccttggtttggatctcggtagcctctcagcccgcaggttccgggtggtgtctggagctagccgaagattctttgaggtgaaccgggagaccggagagatgtttgtgaacgaccgtctggatcgagaggagctgtgtgggacactgccctcttgcactgtaactctggagttggtagtggagaacccgctggagctgttcagcgtggaagtggtgatccaggacatcaacgacaacaatcctgctttccctacccaggaaatgaaattggagattagcgaggccgtggctccggggacgcgctttccgctcgagagcgcgcacgatcccgatgtgggaagcaactctttacaaacctatgagctgagccgaaatgaatactttgcgcttcgcgtgcagacgcgggaggacagcaccaagtacgcggagctggtgttggagcgcgccctggaccgagaacgggagcctagtctccagttagtgctgacggcgttggacggagggaccccagctctctccgccagcctgcctattcacatcaaggtgctggacgcgaatgacaatgcgcctgtcttcaaccagtccttgtaccgggcgcgcgtcctggaggatgcaccctccggcacgcgcgtggtacaagtccttgcaacggatctggatgaaggccccaacggtgaaattatttactccttcggcagccacaaccgcgccggcgtgcggcaactattcgccttagaccttgtaaccgggatgctgacaatcaagggtcggctggacttcgaggacaccaaactccatgagatttacatccaggccaaagacaagggcgccaatcccgaaggagcacattgcaaagtgttggtggaggttgtggatgtgaatgacaacgccccggagatcacagtcacctccgtgtacagcccagtacccgaggatgcccctctggggactgtcatcgctttgctcagtgtgactgacctggatgctggcgagaacgggctggtgacctgcgaagttccaccgggtctccctttcagccttacttcttccctcaagaattacttcactttgaaaaccagtgcagacctggatcgggagactgtgccagaatacaacctcagcatcaccgcccgagacgccggaaccccttccctctcagcccttacaatagtgcgtgttcaagtgtccgacatcaatgacaaccctccacaatcttctcaatcttcctacgacgtttacattgaagaaaacaacctccccggggctccaatactaaacctaagtgtctgggaccccgacgccccgcagaatgctcggctttctttctttctcttggagcaaggagctgaaaccgggctagtgggtcgctatttcacaataaatcgtgacaatggcatagtgtcatccttagtgcccctagactatgaggatcggcgggaatttgaattaacagctcatatcagcgatgggggcaccccggtcctagccaccaacatcagcgtgaacatatttgtcactgatcgcaatgacaatgccccccaggtcctatatcctcggccaggtgggagctcggtggagatgctgcctcgaggtacctcagctggccacctagtgtcacgggtggtaggctgggacgcggatgcagggcacaatgcctggctctcctacagtctcttgggatcccctaaccagagcctttttgccatagggctgcacactggtcaaatcagtactgcccgtccagtccaagacacagattcacccaggcagactctcacggtcttgatcaaagacaatggggagccttcgctctccaccactgctaccctcactgtgtcagtaaccgaggactctcctgaagcccgagccgagttcccctctggctctgccccccgggagcagaaaaaaaatctcaccttttatctacttctttctctaatcctggtttctgtggggtttgtggtcacagtgttcggagtaatcatattcaaagtttacaagtggaagcagtctagagacctataccgagccccggtgagctcactgtaccgaacaccagggccctccttgcacgcggacgccgtgcggggaggcctgatgtcgccgcacctttaccatcaggtgtatctcaccacggactcccgccgcagcgacccgctgctgaagaaacctggtgcagccagtccactggccagccgccagaacacgctgcggagctgtgatccggtgttctataggcaggtgttgggtgcagagagcgcccctcccggacaggtaaggtttagcaagtcatgcttgaccctgttagtgcttttttattcctacatcatattgaggaaggaatggagctgtttttttagtgatgaagatgttttcctggtgatgcattcacactttcaactggcccttcctagatcaaagttagtgcctttgtgagatggtggcctgccagagtgtggtttgtggtcccatttcagggggaagatacttgactcatctgtggacctaattcacatcctcagcactcttttgctatcacaactaaccaatcttgctaagggatggttaagctaaaacacaagatctcagcgatcagagtttagcttggtatcatttacattaggaataagctgctggatacctctaaccagtggcagcttctaggaatacaaaaactacctcattcctccacctttcaagtgattgtgacatttgtattaaaactaatagctttttgataattttcctttgtttatacagatcgtgtacctcattctcagataattttttatgaatgaaatgaaattccaggcatcctttaaattttatttcaagcattctactggaaatgatgtgcaccctgcttacaaaatatttttaccttataacagtaatgcatgtttgctagaaaattcagaaaatacagaaaagtatttaaaaaattaaaactataatctccaaacccaaagataaccatttttaattataaaagtaataatttatttcaaaaataaatctaggcaacccaagaaaacataaagtagccagactcagtggtgtgcacctgtagttcttgctgctcagtgcctgaggtgggaggattgcttgagcccaggagttctgggctgtggtgcactatgctgatcaattgatcaatccactgtctgcactaagttcagcatgaatacagtgacctcttgggagggcaggaccatcaggttgcctaaagaggggtgaactggcccaggttggaagtggagaaggtcaaaactgctgtgctatccagtagtgggatgacatctgtgaatagccactgcactccagcctaggcaatatagggaaaccatgtctctttaacaataacaacaacaacaacaacaatcccagaaactacaaaaggagagtctttttggtgcctccagtgttagtccctgtccttccagccttatttttcttaagtatatgcacaatgtgaaaggtagataaattcatatccttagacaggtaaagcattcattaattcagggtggtatgcaaggatactatccaaggcatggtatccatgcaaggtgactgcaaggcctttgccctggagagaaccctatacatactctcaactgtaggagaaacactgttattttgttactcagtgcatcattgctatcaactcttggatttggcagttagtcaaatgaggttctaccatttaccaactaggagtctgtggccaagttactcaatctcctttctaagcctcttcctcatatgcaaaaagggaataataagtgttttataagattcatgcatgatataatgtatgcaaagtgtttagcatggtgcctggcatatcataactgttaaacaattattagccagctcctagcattttgggaggctgaggcaggcggattgcttgaggccagcagttcaagaccagcctgagcgacatagtgagatcctgtctctacaaaaaaaaaaaaaaatgtgttttcattagctgggtgtgttggcatgcacctgtggtaccagctacttgggaggctgaagtgggagaattgcttgagcctgggaggttgaagctacagtcagctgtgattgcaccactacacttcaaccatggcaatagagtgagaccctgtctcaaaaaaaaaaattatcagctattactataattatttttattagttcctcactcacctaaaatctcaaacacaccttagaaatacacatatgagaacaaccaaaaatgacaaagtagaagcacatatgaaaaggctaagaaagcatgaaagccagcaagaaataactgccgctcttctggtcagcctggaaagcaactggcattttccctagaacaatgttttcaaacttggttgcacattaaaatcacctagagaccttttaaaaattctgaaacccaggccacaccccgacaaatgaaagcacagtctctgggggtgggacataggcatcattttttgaaggtccccacttgatcctaatgtgcagacaaatttgaaaaccacagctttgggaggctgaggtgggtggatcataagatcaggagtttgagaccagcctggccaatatggtgaaaccccgtctctactaaaaatgcaaacattagctgggcatggtggcgcatacctgtagtcccagctactctagaggctgaggcggaagcatcagtgagggagaatcagtgaacccaggatgtggaagtttcagtgagcccagatcacaccactgcactccagcctgggcgacagagcgagactccacctcaaaaacaaaaagaaagaaagaaaaaagaaaagcagtactctggaacctaccaatccatcatttagcatatttgtgaagtaaagtgttattctggtatttgcagaaccagaatccagctttattgggccaggcccaatttttttaaaaaacatggtaaggtctcccagccttaaagtattacatagcatagctctaaaagatcactgtaggaagacataaaatggtatttcagtcatctaagggaaaaaccttcctaaagcactagcccctggacaactattatttaaacatctacagctgttcaatagatattgggttctttttggagggatgtgacaaaattcttgtataattagattgtgatgatgattgtatcagtttagtacatgtaaatacactgaaaaccattggattatacactttaaatatgtgatttgcatggtatgtgaattatgtctcagtaaaaatctagagatggggctgggctcagtggctcacgcctgtaatcccagtacttagggaggctgaggccagcggatcacctgaggccaggagttcaagaccggcctggccaacatggtgaaacttcatctctactaataatacaaaaatcaggccgggcctggtggctcacgcctgtaatcccagcactttgggaggcggaggcgggcggatcacgaggtcaggagtccaagaccagcctggccaacatggtgaaaccccgtctctactaaaaatacaaaaattcaccaggcgtggtggctgaggcaggagaatcgcttgatggtggaggttgcagtgagccgagatcgcgccactgcactccagcctgggtgaaagagcgaaactccatctcaaaaaaaaaaaaaaaaaaaaaatcagccagatgtggtggcaggtgcctgtagtcacagctacttgggaggttgaagcaggagaatcgctttatctcaggaagcagaggttgcagtgagccaagatcatgctgttgcattccagcctgggcaacaagaacaaaactcactccatctcaaaaaaaaaaaaaaaatatctagagatgggagaatcatatggctggcataaaaaggtcaagtcaaagatatgtaagattaaggctttacgatgctccagttctagtaaaacagaccaggtacttgttttggtgtgaaattgccaatataagtatagtactgtacatattagttgtttagcttaggtaagtcttttaatctctttaaactccagtttcctcatctataaaataaagagaatatctactttgcaaacttgttgtgagagtgaaaagtaatgcatataaagtccctgtatggagcaagtactcaataactatttgttgaactaaaaatgataatactgatattcaccatttattagcatccctatgtgccagacactgtaaacaattaaaagttatcattctggtacccagagtacagtatgagacagacatgcaaaaaaaaaaaaaaaaaaagataatggagatctgcatagcataagatgcagtgggaccaaacgggaaaaaacacctaaatgagcctggagaaaggaagaaatgatagaggtggtgatgcttgagctatgatctaaaggttgagtagtagcttgtcagacagtaaaggggaaaggacagggcagggaggggccattgcaagaaattccatgcagagggattatggtatttcattatcactgaaccttaaactgtgtgtgtggccgggtacggtggctcatgcctgtaatcctagcactttgggaggccaaggtgggcagatcacttgaggtcaggagtttgaaaccagcctggccaacatggtgaaacctcatctctattaaaaatacaaaaaattagccaggtgtggttgtgggtgcctgtaattccagctacttgagcagctacttgagaggtcgaggcaggagaattgcttgaacccgggaggcagaggttgcaatgagctggtgtcaggccactgcactccagcatgggcaacagagagagactccatctcaaaaaaaaagtgtgcgtgtaaaacagacagtctttgtaggagatgaggtgaagcaagtaggcaggagttagatcctgagttacctttgggccaagccaaggagtttttattttattccatatagatgacagtcactgcagaaatttgaactgatatgcatatatcatgaggtttttttgttttagaaatattattctgtcagtcataagtgaagggactggggacattgggactggaggcaaagagatcttatctctttgcaatagtttgaaagctattgcaatatttgaagagaagattgataaatgcttgaaccagcacagtggcagtacagatggagggagctgactacaataaaatcatcaggacttgttgattgacatgatataggaagtgagggacagggatgagtcaaggctgatccccctagatcctgactaaggaagctgggtggttgacagtgccattcacagagacagtgaattctggcataaacacctaataggtcaggctggtttacacctccatcattcccatgggagaaggtatagaggggtgtgtgtttgtgtgtgtgtgtgtgtgtgtaaaagaacacagaaagccagattcctctttttgacaccagaatattggttcccaccatagtcaaaaggatattcctgaggatcgaggcttggaaaaatattggggaaggataagaactccagttgttgctgctttttttggcagccagtgtaacctaggtaaggacttggttgaattaagaaatttcatgtccagatcaggatggatttttctatttctctgagctctggtgtgtttcccactcagattgcaggtcgtaggtacctacggtgtgaattgtgttgtgtttctgtgcttgtgcaagggagtagctaggttgctgggaggtctggatgagggtgggggtggggtgagatcaagtctccagctccaagaggtcccctggggctaagtgaaaagcttgctcttttgaaatggtcttcgttggtaattaacaaaagatcaagaataccttggtgtcagataaagggaatttgtaggcacaatgctgttggtagctgatctcaatcattcaaggaagctattaaatctatgaacattagcattctgccaggtaaagagatctggtccttagcacctcccagacacactgattctttactgttttgaaacatctccctctcctggcttcctccaccccgcttccatactgtccttgaaatcaatgaatggtaatttagtgtatctagtgtatcactagcaaatgtctgaataagaaaggtttggtttccgctgtgtctcctgttacaatgagaacatgtactgcataaatttaattggctacgttaatgtgtaagccttttctgcaaagagatggatccgtttctgaatattctgcagaagggcagagttttgagtatatggcagtggttctaattagcagttgctccaatacaatcagactgagacggaagctactcatttagaatactggttgatgacaacactggcttgaacaaagtgaccactctccaatggctactctccctctcagtgggccgcaggttgctagggctcaggctgtggctgttttccccgccgaaaaggggcggggtcagtcggtgtgttaggaaaaaaaatgtatatatatatatatgttgtctgcctccccacagagataacaacccgtggaaaaacatgccgttgagcgggaggaaggcgaaaagataggctgggttttttggggggtgggggagcgtggaggatagggtgggctttttcccctccaatgctgcgacgcattaaccctgctgctgttgggacgttctctgctcagcctattggctgagcccgggagccgctgtctgccaatcgggtggtgaaaggcagacaaatctaccccgccaccagcaaaaacggcgcgtaacccttgcggcgccggccgaaccgcgccagagctggcgcggggaaagggagataggtgtctccagctgctgtggctgtttggggcgggtcggcttcatccgcgtctcaggagcaagtagagaattagcgggcggcagcaatgctccgcaaggtgagaagctggacagaaatctggcggtgggctacccttttgttcctcttttaccacctgggttacgtttgtgggcagatccgctacccggtcccagaggagtcacaggaagggacttttgtagggaatgtcgctcaagatttcctgctggatacggacagtctgtcagctcgcaggctgcaggtcgctggagaggtgaaccaaagacacttccgtgtggatttggacagcggagccctgctcatcaagaacccaatcgaccgagaggcactgtgtgggctcagtgccagctgcatcgtgcccctggagtttgtcaccgaaggtcctttggaaatgtaccgagcagaggtagagatcgtagatgtgaatgatcacgccccccgttttccgcggcagcagctggacttggaaattggggaggcagctcctccaggacagcgtttcccgttggaaaaggctcaggatgcagatgtggggagcaattcgattagcagctataggctgagctccaatgaacactttgcactggatgtgaagaagcgcagcgacggcagcctggtcccagagctgctcctggagaagcctttggatcgagagaagcaatcggactaccgcctggtgctgactgctgtcgatggagggaacccgccgagatctggcaccgcagagctccgggtatccgtgctggacgtaaacgacaacgccccagccttccagcaatccagctacaggattagtgtgttggagagcgcaccagcgggcatggtgctcatccagctcaatgcctcagacccggacctgggtcccagtggtaacgtcaccttttatttcagtggtcatacccctgatcgtgtaagaaacctctttagcctgcaccccactactggaaagcttactcttttggggcccctagactttgagagtgagaattactatgaatttgatgtgcgggctcgcgatgggggttctccagccatggagcaacattgcagccttcgagtggatctgctggacgtaaatgacaatgccccttacatcacagtgacctcagagcttggaaccctccccgagagtgcagaacctggcactgtggtggcacttatcagtgtgcaggatccagactcagggtcaaacggagatgtgagcctccgcattcctgaccacttgccatttgccctcaagtctgccttcaggaaccagttctccctggtgactgctggacccttggatcgagaggccaaatctagctatgacatcatggtcactgcttctgatgctgggaaccctcctctcagtacccacagaactattttcctcaatatttcagatgtgaatgataatccaccctctttctttcagaggtcacatgaggtgtttgttcctgagaacaatcgcccaggggacctgctttgctcccttgcagcctctgacccagactctggcttgaatgcgcttatctcctactcactcctggagcccaggaatcgagatgtatcagcttcctctttcatctctctgaacccccagacaggagctgttcatgctactcgatcctttgactatgagcaaacccagacactgcagtttgaggtgcaggcccgggatcggggcaacccaccccttagcagcactgtaacagttcgtctatttgtgctggacctcaatgacaatgctccagctgtgctccgtcctcgggcccggcctggttccttatgtccccaagcactgcctccatcagttggtgctggccacctaatcacaaaggtgactgctgtggacttggattcaggttacaatgcttgggtttcctatcagctcctggaggccccagatcccagcctgtttgcagtctctcgatatgctggggaggtgcggacggctgttcctatcccagctgacctcccaccacagaagctggtcattgtggtaaaggatagtggtagtccaccactctctacctctgttactctcttagtgtccttagaggaagacactcatccagttgtcccagatcttcgagaatcttcagctccaagggaaggagaatctcgtctaaccctctacttggctgtgtccctagtggcaatttgctttgtctcctttggctcattcgtggcactactctctaagtgtcttcgtggggcagcctgtggagtcacatgctttcctgctggcacctgtgcctgtctcaccagatctcgaaggagggaggggcttcccccttccaatgggatcctccgaatccagctagggtcagatgaccctatcaagtttgttgatgtgggaggccactctcatggctgtacacccttggcttctgcacccactcggagtgatagcttcatgatggtgaagtcacccagtgcacctatggcaggggagcctgttcgcccaagctgcccaccctctgatcttctctatgggctagaggtgagacctttgcaggctcaacaaatgcttgagggttattctgatccaggcatatggctaggccatgtcctagagagtactggcctctcagtaagtgcccatagtgatgtcaccatttttgtaagaggtaactatgtggtagacgctgtgctttgtaactgtttcgtgaattaaccagagttgtcacagtttagcattgggggcgggtcatgcctatatctgagtaagaaatgaaagtaattggtgatcaagagccaggctgttgtggaagcatgatgatggaatgtgggagcacaggaggctacagtgcacagggtacagtgcaccaggcagtcacttggacaaaggtggctgttttctctactcttcctgaaagaggggatcagattctgaagtaccttaactctaggttaccatttcccaagggattgaggggaaataaaatctttgtctcccagtatctagtacactgtgaagggacctctctatttgaaacatagagacagcagaaagaggagagaactaaaggaatagagaggcacgcatcagagtggtggcatagatcttttggtctgggtcttaggactcatatcaagtccctactggggatttgaactagatgcggtaaattggaaggttggggcgggttggtcatcacctttggaaaaaacagtaagtgaaatcacttatgtcagaaaactggtttacagttggctgattcatagaaacagccaccctgtgcatctttaagttgagttctcctgaatttggtgaaaccatgaaacctagaagccaagccatccatgcttggcctctgaccaccctcctgggtgacctgattcagccccagaaatgttcccctacccaaaaactgtaacactcattccacatttggggtctggggtgtcagaaaagctaagtcccatgtcagctgacattgagatttccgcaaagcattgctggagagtcagggcaagactttacaaggttcttactaatcttttctctcaccttagcagcattcagcaggatgggggagggtgggggaatacatgggctttgcctctcccagaaggacaagattttgctggttcaagcaaagtggtggaagcttctgaagtcatgcaggaagttgctgggacagaacgctgaggagttttgtatcactttgtcttccctgttgagtaccatctgagctgtcaaactttgctgccaagggggctgaatcaacctgcagcacgaagtgagtggggaggtaggaagcttctgtgacacagatttgcagcctgtgttcccaaggtttccaggattgaggaaactccataattggttgagagcacacagactttttggccaatcagactcagagctgaggtgggagatctgctcttccagcccgcctctcctcctccagctccccagctccactcaaattcagctcccctcccccctgcccacccccgccactcggtgactaagaactgctgcaagcaggcaaacctccgagcagtttttaagaggctggaaggagacataagagacttcagctgctgcattccaagccctgggtctaccttggagacaggacagcacagacttactctccacaaagggacttctgggtcatggggcccaagacactcccacagctcgctgggaaatggcaagtgctgtgcatgttgtccttgtgctgctggggctgggtgtctgggcagcttcgttactcagtggtggaggagtctgagccggggacgctggtggggaatgttgctcaggatctgggcttaaagatgacagatctgttgagccggcggctgcaattgggctctgaggagaatgggcgctatttttccctgagcttgatgagtggtgccctggcagtgaatcaaaagattgaccgagaaagcctatgtggagccagcaccagctgcctgctgccagtgcaggtggtgactgaacaccccctggagctaatccgtgtagaggtagagatcctggatctcaatgacaactctcctagctttgccacccctgagcgagagatgcgcatctcagaatcagcagcatctggggcacgattcccactggacagtgcccaggatccggatgtgggcaccaatactgtgagcttttacactctaagccccaacagccacttctctctgaatgtgaagaccctaaaagatgggaagccattcccagagctggtgctagagcagcagctggatcgtgaagcccaggcaagacatcagctggtgcttactgctgtggatggggggaccccagcccgctcagggaccacccttatctctgtcatcgtgctggacatcaatgataatgctccaaccttccaatcctcagttctacgtgtgggaatcccagagaatgcacccattggtactctgctgctccgcctcaatgccactgatccagacgagggcaccaacggccaactagactattcttttggagaccacacatctgaggcagtgcggaacctctttggcctagaccctagcagtggggcaatccatgtgttgggtcccatagactttgaggagtcacgtttctatgaaattcatgcaagagcccgtgaccagggacagcctgccatggagggccactgtgtgattcaagtggatgtgggggatgtcaatgacaatgccccagaggtgctattggcctctttggccaaccctgtcctagagagcacaccagtgggcacagtagtggggttgtttaatgtgcgagaccgggactcaggtagaaatggtgaagtgagccttgatatctctccggacctgccatttcagattaagccttctgagaaccactactcgctgctaaccagccagcctttggaccgggaggccacatcccactatatcatcgagctgctggccagcgatgctggttcaccttccctacacaaacatctcaccatcaggctcaacatttcagatgtcaatgacaatgcaccccgcttcaaccagcagctttacactgcttacatcctagaaaaccggcctccgggctcccttctttgcactgtggctgcctcagatccagacactggggataatgcccgcctcacctactccattgtaggaaatcaggttcagggagccccagcctcctcctttgtgtatgtcaacccagaggatggacggatctttgcccagcgtacctttgactatgaattgctgcagatgctgcagattgtggtgggggttcgagactccggctctcccccattgcatgccaacacatctctgcatgtgtttgtcctagacgagaatgataatgccccagctgtgctgcacccacggccagactgggaacactcagccccccagcgtctccctcgctctgctcctcctggctccttggtcaccaaggtgacagccgtggatgctgatgcaggccacaatgcgtggctctcctactcactgttgccacagtccacagccccaggactgttcctcgtgtctacacacactggtgaggtgcgcacagcccgggccttactggaggatgactctgacacccagcaggtggtggtcctggtgagggacaatggtgacccttcactctcctccacagccacagtgctgctggttctggaggatgaggaccctgaggaaatgcccaaatccagtgacttcctcatacaccctcctgagcgttcagaccttaccctttacctcattgtggctctagcgaccgtcagtctcttatccctagtcaccttcacctttctgtcagcgaagtgccttcagggaaacgcagacggggacgggggtggagggcagtgctgcaggcgccaggactcaccctccccggacttctataagcagtccagccccaacctgcaggtgagctcggacggcacgctcaagtacatggaggtgacgctgcggcccacagactcgcagagccactgctacaggacgtgcttttcaccggcctcggacggcagtgacttcacttttctaagacccctcagcgttcagcagcccacagctctggcgctggagcctgacgccatccggtcccgctctaatacgctgcgggagcggagccaggtgaggggctcggcgccgccccgggcgacccctgggggcggcactggagaagccgcccgtcctcataagggattgaacttgcatccactcctctccggccggcttggtcgctggctgcgctccacccgattctcgggatcattggaccgtttgcgcgaaaccagagtggccgattaagggatggggctccgagcaccgggggtggtggcgactgtgggcgaggggaggtgggaccgacccccacccctacactcaaaaaaggccggggcctccttcgagcttccggtgaatttcgggcgatttccgcgggtgtcgggggtcccgggaggaggcagtcacagatccacccctgcagccagcctcctaggcgccggctccggcacgcttcgccggtctgtagatttcctcttcgatttctccccagctcccagcatctgtgacttcactgttaccctccctatccccgcatcacccaaccgcacctgtctgcgggacttaggtgtgcgcgcggggctcatgcgtgtcctccctgctggccacccccacggcccacacaagttgcacgggctcgccacgccccgccaacacgtgcgcggacgcacgcacgcactcctcgcacgtgggcttacgcgaataccagctttcactgccactcgctcgcggccagattcacaggcctgttccggtccactcgcagctcccctctgccgctccctccgccgggctcaggagtactcgtagctgattgtgcgcgcctgagggtcccagatcgcggccgcccaggaccaggcgaggactccggagcctcctctcacctctcccacctgcgccccgggctgggccgggtcgcctggggggcggcctgagcgaggcgcggggccaggagcgctggagcgactgccgctctaagtgccgggcgggcaggactctacgatccttgggccagaggtccggatggtcccgggactccgtctcaagggtcggcgacccctcaacccagaagcctcgagcaggcggacaggcagagctgcccagtggccgaggcgcggcagggctccgcgttgggcgagtgagtgagcctctataggacagcaggactgggactccagtggcaccagcggccccttcctcccgcaggaagtgaaagcctcgagcgccctggctctcaacccccagagatacaggcttttggcgccgtcgtgatcacaatgtgcccagcgatctagggtcagagatttggaggtgaccaaactatctgacactctaacaagtcctgtctcctctggcagatggaaagctataggctctgccagatgccagggtgcccttatgtgtgaggaaactacaatagtaaaaaacacaagtttctccaactccaggagcttttattcaaaatatatcaatgcctaactctgctcctaggactgtattttgaaacacccccaggtgattttgatagctgattgagagaaacttactatataactcctttgagaacctcatctcatttgctcttcccaccattgctgttggctaggtactaacatgcctctcttataacagcttcacagaggtcaagtgacttgctcaagttcacagagcaagtaagagagattctaacccctgtctaactccagaatgtgtgcttttaatttcttggcacttggaactttaaaagcttgaggacaggagaggggagttgcctctgctgggattttgcttctgctgggatggggcaagggtggggttccttcccttttaggaccttacatgtggggaaagtcttctgtggctcctcatttctgagcagtccccgcagcgcaaacttggccagttatccttttggagattgagttcccccagctccgtttcctcctatcacaatcactgcatttccatgtagattctgctgtgtctaagaatacagtggctgagggctggccatccctgtgcccttctccatggcagccccagaatggtgctggtgactcccgatacacctggaatgctaggtttctgggttctgctcatatcactgccacctgtgagccttgagtgagccactggcagttccggagcttccttctccctggagtaatctgagatactcacactctctgcttctgggagcaagtatgagtattaattaccagcccaccccagaaccagtgaggaggtggctctaggagtgctccatgagagtgtgtgatgggataacacaccccctggaaagaccagaagggactcaggaatgaagtggctggccagagccccacaccttcagctaggtgggagatggctacacatcagccccttgggagccctggagacttagttggccctgcttggaggctgtgggagctggatccctccccgctgcatcccttccatttttctccgtctcagacagagcagccttgttctcttctccttagtcacagaccattgtctggcacggagttctaggggtgagaagtgtcccgggacttggatgccccgcaaaggcccaatctggcatgactcctaaattaataatgtatttagctgtgggaagagattcttgcaagccaagggcccagagaagatgtccctgtgaatgtgtcactgcacaacctggcaccaaaagggttaccaagaacagcagccatcttgctgcagaggatgctttgttcccagctgaggagttgaataaattcattctagggctggtagaattctcattgaaaagcctcctttgccactttagggggctttgtctgcacctcttcccccagttccacagaagatgccttcagtccttgaattttggctcaggagttctgactctgggggcagggaggaaggggccatttctttaggaaaggagtctcagcttgctcactgtggtcagatgaaatgtgatttatctcttggtttctggtacctcagacctctgagacctgaggtgtattttgtctttggagatgagtccacccctgccccctcttagtccgttttcttctctgtgcccactcccctccttctctcccggcccatccctaggggctcgggtgacattctaacttctcacgggtactcagcccctttccctctgttttctccacagcaagccccgcccaacacggactggcgtttctctcaggcccagagacccggcaccagcgggtaggtgactgattctccagcccaccctcttctctgcggcattttctcagggatgacgtgggaggagatgggggagggcccagcatttgctacagatggcttctccctcagtttgagatcccagggaggtcttggtgtgcggggggctggcacacagaccccggaaggaagaggcgactgccctgactgttcaggaagctcaattcacatgcttgccccttccctcctcgccacgaccggcaccttttcctatcccctgagggcactgtggaaccaaaggatggtcttaagctggtctctgggtgaaagcgaggctttctatgcccatgtactgcctaaccccctcccctgagttgagctgggctccattatgacctggggctcaggcagaaaagcatttgaccggaggaggcggtccgcactcagcgcctcctccagagcctccagagccgaggctgactgcagcctggggagagtggaggcagcacagctggaggtggaactgaggaaggactgggcggggcatggagcaggcccccttctccggcccctcctcccactgtcctctgcccctacttgtcctgctctctgtctgtggggtctccgtgtctctgcccctttttcttgagtttccgtctttgccactttctcttacctctcagtccttccctcagtctctatctcgctttgcaatctctgcctctccctctcttctccatctctgtcttagcttccgtcttgattgctgcacctcagcctcagtccctttcatttgtctacttgcattgatctgtgccgcccactgtgcctgccatggcataagtgctcaataaatgtggagtgagtaactacacgggacccttagtctctttctccttctctatctctgcctccctgtccttgtcctggacctcttttctgtttctcctttcaccgtttcctagcgccttgtgttcttctatccccagcctctatgtttctctgtctctcactatttctgctttcctctctgttctttgtctctctttgtctctgtctctgtatatctttctttgtctctgtctctggtctctgtgcctgttgtctttttctgcctctttctctgttactctttctttatctctctttttcttttatcttgtcttttttctctgagcctctgtctctgtctctcatttttttgtgcttgtgggcaagccagcacacacaaccccccacccaccacccaccaacaccccgctctcttccttccctgcccctcacacactgagcctttgatcgcagctctccaccagacaccctcccatccaagcagccccagctgctcatttcaatctggtatgaattcctgctgagacaggaaccccctgcgggctgaaggggagggaaacttcagcagaaagaccttcagttggtctgagcagagtgggataggctctgcgccaggcctcccagttagaagtcaggagcctggaggagtctcagagcccagggagagaagcaggagcttgggccaccttaccctacctcctcaatggttgagtacttgctgtccacatttgccaagttgctacagatgctgagcttccaagagttatctttcccccatcctgcaaccaaccaaacccttgttgccacaaggacccaggagcccttggtgtatggcagagattccagcttctgggcatgcacagtcctgtcacccattttaggaacgcaaagcgcttcttagaaggcccctaaaaagcagcagatcaaaaggcttgggctgcccttgcccttcctttgaccccagctgttgtccttctccctgctggccttgccaaccttctcataagttatccattaagtcattaatgtattcattcgttcatttattcaacaaatatttatcgagcatctactatgagcagggccctgtgctaaacattgggctataggagtgaacaagtagatgtgatcccagaactcataggcttccagaccagcagaggagactgaaaatttgcaacaagtaacacttaaaaaaaaaaaaaaaggctgggcactgtggttcacgcctgtaatcccagcactttgggaggccaaggtgggtagatcacttgaggtcaggggtttgagaccagcctggcagccaacatggtgaaaccccatctcgattaaaaatacaaaaattagccaggcgtggtggcaggcacctgtaatcccagcgacttaggaggctgaggcagaactgcttgaacccggaaggcagaggttgcagtgagctgagatcacgaaaaaaaaataatctagccacaaatcacagtaagttctgagaggcagagaacaatgtgagtgtaatgggggggggaagatcagagaaggcttctaggaggaggtgacattgagaagttctaggccatttatgttccctctacctaccaccaccccaggccatacactggctttgaagcagaattcaccattgaacctggaagccccaccaactgcctctcatgtgtcctctggggtgagcaccttacccctgcctcaactcccattccatcaaatgagaggcttagtggcctggaatacatgtgggagctcttggagatatggaggagaaggtgcggaacctctctctctctcctctctctgcttccttagttaacttgtggaggatgcaacaaaccttttttttttttttttttagacagagtcttgctctgttgcccaagctggagtgcagtggtgcgatcttggctcactgcaacctctgcctgccaggttcaagcgattctcctgcctcagcctcccgagtagctgggacagcaggtgtgcaccaccacacccagctcatttttgtatttttagtagagatgggtttcgccacgttggccaggctggtttcaaactccccgacctcaactgatccacctgcttcagcttcccaaagtgctagaattacaggtgtgatcgcccccggccacaacaaacatttttgattcagcggctccaaagtgaaataagcgttaggatctagtccagtaacttcaacttctctccttcattcattcaacaaatggtcagtgagcactttctgttggccaggcagtgttctcgatgtgggaggcccctgccctcaaggagtttacagtgcactgaaggagacaaatattgaccaaataattacaaaaataaatgtgagactgaaactgtcataagtgctaggtagaattgtatctggtggtgtgggcgtataatagggatttgatttagggagcaggaggacatcctggaaatgaagttgtgctgagatctgaaagacaaatacaaattaaccagctaaagaaaagaaggaagagcattccagatggtcaggcataccagcttcaaagcagggctggtgttgagttcttcagtaaacttggttcaagatcaagccagctctgggtcacactgcctacacagaaggaagagcattccaaatgggaaaagcctatgcaaaagccttgtggtgaggcctcctgggatcaagggaatggcagggagttttctctttgctggcactggagtgaggggatgaagaggagaggttccttttatccagtctaaccctggttccagccttctgttgatgccctgcctcactccctccccaccatcttgcccactgccctccagcctggtctggtcagacacaccagcttcaaagcagggctagtattgagttcttcagtaaacttggttcaagttcaagtcagcactgggtcacactgcctagacagaaggaagaagacctggccaggtgtggtggctcacgcctgtaatcccagcactttgggaggctgaggtgggtggatcacctgaggtcaggagtttgagaccagcctggccaacatgatgaaaccccatctctagtaaaaatacaaaatattagccaggtgtggtggtgcacacctgtagtcccagctactcaggaggctgaggcaggggaatcgcttgaacccaggaggcggaggttgcagtgagctgagatcacaccactgcactccagtctgggtgacagagcgagactccatcaggaaagaaagaaagaaaaagagagagagggagggagggagggaaggaaggaaggaaggaaggaaggaaggaaggaaggaaggaaggaaggaaggaagaaaagaaagaaaaagggagaaaaaatgaagaagacttacattctgaagttcctgcttggcacatgcttctcctccccaccactatcccttctcaggtcatcctttgggtgtctgatcccaatagctgttgtctcaagctctgagcccagcaaaccatttcccccttcttaggctgtaacccaggccctgccctgcagctgtccccagcctctgcacaaagagtctccatttggtccctagactgttctctgatggctccacactaccatccctcctctgagagacagtatccctgctctctctcagtttgggcagtcattcaacaaacaaatagcaacttaatttttttccacttataaaatagtacatgctcattatagaaacatgaaaaatagaaaaaaaattaaaaggaaaaccacccatcattttacaatctagggagaaccaccaccaactacagtttaatatgaaacatttcaaatatgtacaaaagtagagagaatggtgtcatgaacctgtatgataccactatccagcttcaactaatgccttatcttgtttcacctatatccctacccttatcctgtccttggattcttttgaagcaaatctcagacatcatataatttcatcttggtctccaccatctttaacagatgacttttttttttttttttttttttggagacagagtctcactctcttgcccaggctgtggcacaatctcagctcactgcagccttcgcctcccgggttcaagcaattctcatgcttcagcctcctaagtagctaggattacaggtgtgcaccaccacacacagctaatattttgtattttcagtacaaacagggtttcgccatgttggccaggctggtcttgaactcctggcctcaagtgatccaccctcctcggcctcccaaaatgttgggattacaggtgtgagccaccttgcccggccagatgattctttcataaggtccacattttatatttgagtgagtgtctcttaagtatcttaatgctcttttaatgtaaaagacttcccctccatcttccatttttgcaatttatttgttgaatccctgccttttcatatatatctttctaaacttttctttgtgtaatcaaagaacatgcatgagcttcatttttatttttatttatttatttatttatttatttatttatttatttattgatacgtagccttgctctgtcacccaggctggactgcagtggcgcaatctcggctcactgcaagctccgcctcccaggttcacgccatgctcctgcctcagcctccagaatagctgggactacaggcgcccactaccacgcccggctaattattttgtatttttagtagagacggggtttcaccgtgttagccaggatggtctcgatctcctgacctcgtgatccgcccgcctcggcctcccaaagtgctgggattacaggcgtgagccaccgcgcctggccgagcttcattttaaaaaaatctcattcacctaaataagttgttcacaaacttgtcacactttcatgtgacactttattcacatattaagaactgttattcccagtcatacggtacatttcctactagttttttaaaaatagcaactgaggccatactgtccaacagaattatagcttttttcttctttgcagtgtatcatgagaatttccccatgtctttcaaaattcttcccaagtcatttgcagagtaactcctcttatgaatatacatattattttacagaataagtcctcatatgaatatacatattatttttctaatgctaatgggcttttgctacattagaaaacatacacattcatttacaattttttttttttgagacagtctcgctctgtctccaggctggggtgcagtggcgccatctcggctcactgcaagctccacctcctgggttcaagcaattctcctgcctcagcctcctgagtagctgggactacaggcacgcgccaccacgcccagctaatttttgtatttttagtagagacggggtttcaccatgttgaccaggatggtctcaatctcttgacctcgtgatccgcctgcctcagcctccctaagtgctgggattacaggtgggagccaccatccccagcctcatttacattttaacacaattaaattcagggtgttgtcagggtgacttcctagatttctcagttttttgagcatgatgtagggagtattttattatagtccagtctatgggatattcccttatacacacacacacacacacacacacacacacacacacacacacaccccaaactcaatagggcaagaaccatattcatcatctcttaaatcctaggtcctgtcacaggccactgcttggaaaatagttgactaaatgtagtccatttcttccatttttacttttcactattccccaaatcctggaagagtccctcatatctgctgctggggctccaaggcctccaagctgaagcccagtacgttgttgtgcataagatcataggccctggaatcatattaggctggctttcaggttgcaactctaccagttccagctgtgtgactctggtatagtctctcaacctctctgagccctgttttcatctgttggaaaatatagataatcacaacacttatctgcagggtgattccgaggataaaaaagacaaatatattacccagtcagcttagaataggaagctctcagtaaatggttaaaaaagaggtctctctccctctgctcatctcttacccagcttcacataattggcagcccacccacctgtttggccctcaaccttcaaccatttcccaggacgcctccttacactcctgatcatcatggttccaaccccactgttccactcagctttgttccctcaacaccactgctccctgtgacaggtcatcctcctaacctctggcatctggtcccgttgtctccctgacaacccgcatgctctcctccctgcaacccccgccgcttgcctgctctccctactttattcccattagcccccttcacctggggctgagaacacctggccttgaccctgcaccctcagccaggcccacagagctcagtcgggccggaagtaaggaccccagatattcagttgaggaatttaacattaatacaataatatagaatccaccagcagattttcataaatgttctgtgtgttcttttatccttttttttaatccaggattttatcaaggagcatagattgcatttggttgtcacgtctttcctctcctttaatctggagccagctcccagtctttttatttttttaatgacatggatatttttaaagagtccaggccagttgtactttaaaatgtccccgaacctggatttgctggctattctctgatggttagattcagattacacaccttggtaggaatacttcccgcagcatcacactgggactcatctaacgtcggcctgtcccactatcagtgatgccgagtttgttcgtgtggtaaaaacagtgtcccagatctctccattataaaaatatatttttataaagatattttaaaatatttgtgaaaatataagtaatctgtggatgatactttgagataggcagcaacccttcatgcaattttagtattccctgatgatccttgcctgtatctgtttttacatcagtgattacaaagcggtgatgttctgtcattccttctacatgtatttgctggtattcttctgaaaattacctggatgatttcttcagatttaaattcactgtcttttccttggggaagcctggactggctgagctgcctaaccctgactctctgtcttttttttttttttgacagggagtctagctctgttgccaggctggagtgcagtggcaaccttcacctcctgggttcaagcgattctcctgcctcagcctcccaagtagctgggattacaggcgtgtgccaccatgcccggttaattttttttttttaatatctattttagttgagacagggtttcaccatgttggtcagaatggtctcgatctcctgacctcgtggtctgcccgcccctgcctctcttcataccctctggtagcccctgacacagcccatggcaagtatcacaattgcaattactctattgtgtaattatttaaaatcagcctctcagtgcccaccatgagcaccgtaaagatggacagtttctatcatactcacagccacaaccccagcacctggctctgtgtctggtacatagaaattgctcaagaaagaattgttggaggggcgcggtggctcacgcctgtaattccagcactttgggaagcggaggcaggtggatcatgaggtcaggagttcgaaaccaacctggccaatatggtgaaaccccatctctactaaaaatacaaaaattcgctgggcatggtggcatgtgtgcacttgtcgtcccagctgctcaagaggctgaggcaggagaatcacttgaacctgggaggcagaggttgcagtgagccgagatcgcgccactgtactccagcctgggtgacagagcgagactccagctcaaaaaaaaaaaaaaaagaaaaaagaaaagaaataattattgaatcaatggaaacagaattacaactcttcccacttttgggaaggagaattgagattcctgctttccccttcaaccctagctttatgtttgttgtgatggtatagaggtcacacatggcagccttgtgtctgttcttaggctgagttcatctacttagggacggggaatcccagattgggcaaaaccaaaagcagggacagaccttggaaaaattgtaaagcagttcttggttgtgctcacccaccatgacaaaatatgcacacacacaacgcaacacacacacagacattttcatgccttcaaggcctaccctacagcctttcccatggtgccaaacccttcttcttaccttacagtcacttaactgtctctgctggtctcttcccactcatttaggcaacaaatatttattgaaaaacttctctgagccagatggtgccaaacagttacctaaagggcagactgtgtgtgtgccagggctgtttcccgccaacactcccctgcaaattgaaataatttcatccttggaaattcaaaaaaatcatgaaaattgtcactgtgggaaaattccaagtagagctgaaccttctaagaagcagagagttcttcttatggtttagtatttttttaaattatgaatcatttcatgttttttcaacactcggagtttctaaaagtctcacttaggtccaagtgctaggctttgtgctaggtgcttcagtaggaagcaggtggagtcgctgcctcacagaagccagtgtggtggaggaacagacaggcactacaacagctgcagtgtgactagtgccatgtggggcagccgctgggatgggagtacagtggaggcacctgcccagtctgagtggatctcctctgatatattttattcgtgtcatcatggcaaatgttgggggactggcattctagggaacaccatctgcccaggattcacagcaagagggaacttgagggataggaaagtgcaccttggaaaaggtttgatgatagagtgtttgagggcggggggtgggggttcttgtaaaataggaggggcaggttcttctatggccgtggattttactctgagggcttaggaagccattgaattttagaaatttcttctccctgctccagggtctcttggggcctcctacatctccccctaggtacctcctaggtccccactttttctctagctctggaacattctcttccatttcccaccttcacagtcctctggagaaggtctgatctccctcactatgacaggaagccaggctctctcatggtgggtgggggaatgcactatgttcaatgcattggaccagcctggccaacatggtgaaaccccgtctgtactaaaaatacaaaaattagcctggcacagtggcaggtgcctgtcatcccagctacttgggagactgaggcaggagaatcgcttgaacccaggaggtggatgttgcaatgagccaagatcgcgccactgcactccagcctggatgacagagtaagaccctgtctaaaacaaaaagaaaaaagcatcggaggcagcaaagagctggtttgagggactgacttgtgggattctggcttctgaaggattgtagaagtgcctcctaccttgctgagagaaacaggtcttgggcatggggtagggttagggtactaggtttgggagccctgggagaggacaggaggggcatgagctgtgccggcctgggagtctgtgctcaccatcctactctctccccagctcccaaaatggcgatgacaccggcacctggcccaacaaccagtttgacacagagatgctgcaagccatgatcttggcgtccgccagtggtaagtggtgtcagtgtgtgtatggaagagtgggagacctggggttctggggtgcatctcacagccaccatgcccacggactggatgtcaaacctgtgtagtttctccagatctttcggcaggtctgaaaggacccacaattccaaacataaagcctggaattgtggctaaggaacagcagaggggttgggggtcctgggatgcctggaggagagcgaacaaggaaaagactcatggagggaatagtggttacaagtctagctctggaatgggacagtgtagctcaggtcctagctctgctactatccttgggacttggatcgacttgctcaatctctctaaacctcagtttcctcagcctagaaagtggggacagggaccccaaagggttgttgtagagattaaatgagatgataccacaaagcatagagttctgggcctggcgcttggaagccctcaagcaatgaaagtgggtgtagaaatccccagccgagagaacacctcctctttatgcgaggctcctcttttgctgcccctaactccagagtaggattctggttttcccataaggttgactaagggcttcctttgtaatagagattcggctagtggtggttgtccctgaagagtcactagggcccagagcaggagaagaagaatatcatttgtccttaagagcacagcctaagctgggcgtggtggctcacgcctgtaatcccagcactttgggaagctgaggcaggaggatcatgaggtcaggagttcgaaaccggcctggccaacatagtgaaaccctgtctctactaaaaatacaaaaattagctgggcatggtggtgcgtgcctgtagtcccagctacttgggaggctgaggcaggagaatcgcttgaacctgggaggtggctgtggtgagcagaaaatcgcaccactgcactccagcctgggcaacagtctcgctctgtctcaaaaaaaaaaaaaaaaaaaaagagcacaggctttagaggcaggccaatctggattcaaatcctggcacctggcaccaccacttagcaatgagtccttaggtaagttattaaaccccctcggtttcacttactattaatgggcacagtattaacggatctcattgtggtgttaccagggccaaatgcaagtccctcagcacaggattggcagagagtaagggcacaatatattattatctttgctgacccaaacccgttttttactgggtagaaagcagaattagaataatgcctattaataaagactagcttctggagcagcaaatcctgggcttataaggaggctggcagaggatcaaggcattgccctatatcatgaactgatagccctgccctccagcatgtctggaggactggtgggtagagaaccaggtgaaatcacaagaagcactgtcatcacacctgggcacatactaaacaaactttaggggcctcctgtcaatgaatcctctcaatagctctgcaaggcaggtctgatttctcacactcgacagatgagagaaccgagaaggcacttgccccagggtcctcagttttgagctgccaagctgaggttctaacctggctcaactcctaagtttatgctctttctactatagggaccatggctgcctttggatccagcctcggcttctctattacctgagcaggatgagaggctgtcctcttcctcgagctctgctttattcttccagatcagggttgccagataaaatacaggatgcccagttacagttgaatgtcagataaacagcaagtactatttcagcataagtcagtctcaaatgttgcatgagacataatgtactaaaaaaaaaaatgctcattgtttacctgaaattcaaatttaactgggagccctgtacttttatttactaaatctggcaactctaccccagatgtctgtgaggttaagtggggccaggcctacagctgacggaaggacagagagagaggtggcagggactgctggcctcctgaggcagagctgtcccaggtctggtggggctatgattccagagaggccagagactgagtatgaaagtggcaggcggctgggtctgaggagatgccaagttggcctcttgagggaaataaacaggtatatttagctgttgtggccttgcgccctgaggccaggaagcagctttttagcctaaatccagatgttaaaaacagaaatgaaatcagtatttatggccccaaaccctccaagcaagtcatgcagctcgttcccctgtcaaggcctcccacctttggcccacacagggcctgaccctcgtctaagcctgcgccctggggaacggaccctgggggtggaggtggtgggtcaggccctgctctcactttcacacccgcttcctagccctgaaaccagagaggttcctgaagtccagcccagccaggcctgtggggctgctgagaggggttaagtaagagggagagtaaaaaccgacacttgggaggaggcttttaaaataaacatctgcggggagggatgctctcaaggaggctgcggtttgcagctcagccagctgtgttccagctaatcagcctccttgggctactctggagttgctgccttggccctgggatggggtaggttaagaggacagagggaggtcagggagctgggggctgagtttccctgagtagaggctggcacaggagagaaggcatcacccccacctcgtccaggccagaagatgtccagcttcttgaggctctcctaagtctgcctctcctgggaccaagagaaaatcccggtccttgaccaaggtgggccttggggggagtggggtgtagagggaggggcactggagaactgactctacagaaagtcaaagctggcaatccaacttcttcccctcagatttatagatgggaaaacaggcttgagccacgcagagacttgaccaagctcacacagttccttagtggcagagcagagcaaatattctctttcttttacattctggatttccatatcttctctccctcctggtccagcccaacctcagggcaccccccacgaggtgggcgggggatggctttgtcacttgcacccactcggggtgctactcagagatcttgggtgcacataggacgtgggtgggccgagcttctagctactccgtcaggcccttcctgtcattctgtctctgcctcccttctccctgcttctccgtgttcctcctcattcttttctgtgtgcagggagactacaccccccaccccgctctttctctggcgcctctgaggtcccccctctagcccctaaatcactctggaatcctggctctttgaagccagatctgggcccccctcccctaccccttccattcccaggctgggaaaggctgaagaggctgacggctggaggggagggggcggggcggtggcggatctggcttccttttggagttaattagggaaaacagagaaatgtcagcggaatgaaagggctgggggtgggggccagctggggtaggagaggaggaagtgggcagctgctccctcccactcaacccctctcccccgcccccagaaagctctcagctccggggatttgcgacatgaaatgggggctgtagaaacctgagcgctggtgcgtgaagagaaaaaccgaggcgcatcccggctctcccctcccgtgtgccctcctcctcttatgccggcttgaaaatatttcctgtctctctatttctcaatccctggttgatgtcccaggattactcagcctctccggctttagtcactctcgctacccgctcccagggtccagggtggaggcagagggaggctgggagagaagctctactgccagctgggcctgggctggcctgggcatccctgaggttttaactgtctcctaaccacagaggatctcagggcctccagcagcgagccccaatgagtcaaactcttgtttcctcctctcccacccccgacccagtcagggcaggtgaggggtagaggtgatggcatgctggatgtgacggtgttgatgatgtattgcacaggatgaagcaccatctcatttagtcctcacagcagccttcacagtgcgtacaaatcagctggcaattccgagaggctgcattctaaacaagttcctgggtgatgctgagccagggccagagtgtggacttctctgggccccagtttcttcttctgtacagtgggacgttggactggaggtgctgtctgatgtcacctagctgtggcactctgagcctgtgcctaaagtgtccctgagatgtctagtccccgagatcatcatctcctcagcttcatagagccgagctcttctccatcttctctctacctcccattcactcagaacagggataaggtccaagctgctggtggtgatggtgactgactgtcccttccagcatgcgcttaggtacacttgggcctgaatgcccctctaacaaatgctaccgggtatggccttggtccttctaacacttggttccctcatctgtaaaatgagggtcataccacatagctggctgggctgttatgtagaggttaaaagtgattgtgcatgtgaagcatccagcagagtgcctggcacacagtaggtgctcaaatgctgttttgaaatacaaaaattagctgggctagtggtgtgcacctgtaatctcagctactcaggaggttgaggcaggagaatcacttgagcccaggaggcagaggttgcagtgagccgggatcgcgccactgcactccaggctgggcgacagagcaggactccatcttaaaaaaaaaaaaaaaaaaatgctgttttgaaatggaggcttggaagagcactcttcacccccaccccacacacttactaacggaactaccgaatctctactcgtgccaggccttgcttggcaaaggctaggggcatgtaaagccatggtttcatggctgctgccctccaggagcccatggtctagtgtgggagtcagaggctcccttgagaaagccagggcaaggaactgagagcccgtgtcacagccctgagagaaataccagcgaatgtgttttgagcacttacatctaccaggcactattttacgtacctgacatacattttcttatttagcattcactaaaaccagaagaggtggttaccattatcatccccattttgcagatgagaaaactgaagtggcataaggaggttaggtagacttgcccaggatcacagtgagtaaggaaaggagctaggaatcaaacctagactttctcactccagagcctcttaacctctaccctcaactcttgtgaagagagactaccttggtgacccctatattcccagtgctcagcgtggtcaaggcccagggtgctgtataggcattcattaactgctggggatataagacagtgactgttgaggaccctaagtttagctcccacctgatcttcctctgtctctgcagaagctgctgatgggagctccaccctgggagggggtgccggcaccatgggattgagcgcccgctacggaccccagttcaccctgcagcacgtgcccgactaccgccagaatgtctacatcccaggcagcaatgccacactgaccaacgcagctggcaagcgggatggcaaggccccagcaggtggcaatggcaacaagaagaagtcgggcaagaaggagaagaagtaacatggaggccaggccaagagccacagggcggcctctccccaaccagcccagcttctccttacctgcacccaggcctcagagtttcagggctaacccccagaatactggtaggggccaaggccatgctccccttgggaaacagaaacaagtgcccagtcagcacctaccccttcccccccagggggttgaatatgcaaaagcagttccgctgggaacccccatccaatcaactgctgtacccatgggggtagtggggttactgtagacaccaagaaccatttgccacaccccgtttagttacagctgaactcctccatcttccaaatcaatcaggcccatccatcccatgcctccctcctccccaccccactccaacagttcctctttcccgagtaaggtggttggggtgttgaagtaccaagtaacctacaagcctcctagttctgaaaagttggaagggcatcatgacctcttggcctctcctttgattctcaatcttcccccaaagcatggtttggtgccagccccttcacctccttccagagcccaagatcaatgctcaagttttggaggacatgatcaccatccccatggtactgatgcttgctggatttagggagggcattttgctaccaagcctcttcccaacgccctggggaccagtcttctgttttgtttttcattgtttgacgtttccactgcatgccttgacttcccccacctcctcctcaaacaagagactccactgcatgttccaagacagtatggggtggtaagataaggaagggaagtgtgtggatgtggatggtgggggcatggacaaagcttgacacatcaagttatcaaggccttggaggaggctctgtatgtcctcaggggactgacaacatcctccagattccagccataaaccaataactaggctggacccttcccactacataatagggctcagcccaggcagccagctttgggctgagctaacaggaccaatggattaaactggcatttcagtccaaggaagctcgaagcaggtttaggaccaggtccccttgagaggtcagaggggcctctgtgggtgctgggtactccagaggtgccactggtggaagggtcagcggagccccagcaggaagggtgggccagccaggccattcttagtccctgggttggggaggcagggagctagggcagggaccaaatgaacagaaagtctcagcccaggatggggcttcttcaacagggcccctgccctcctgaagcctcagtccttcaccttgccaggtgccgtttctcttccgtgaaggccactgcccaggtccccagtgcgccccctagtggccatagcctggttaaagttccccagtgcctccttgtgcatagaccttcttctcccacccccttctgcccctgggtccccggccatccagcggggctgccagagaaccccagacctgcccttacagtagtgtagcgccccctccctctttcggctggtgtagaatagccagtagtgtagtgcggtgtgcttttacgtgatggcgggtgggcagcgggcggcgggctccgcgcagccgtctgtccttgatctgcccgcggcggcccgtgttgtgttttgtgctgtgtccacgcgctaaggcgaccccctcccccgtactgacttctcctataagcgcttctcttcgcatagtcacgtagctcccaccccaccctcttcctgtgtctcacgcaagttttatactctaatatttatatggctttttttcttcgacaaaaaaataataaaacgtttcttctgaaaagctgaacgtttctgtataagcgatggaagctcctggcatgtgtgcatgaagtgatgagctgaggtgggtgctggaagaagggcggaatcgggaggccactttgtgtcattgcgcgtctagatgtttccgaattgcgtgtgtgtgtgtgactgtgcaatatggttgtgtatgcttgcaatgccgttgtgcctatgagacagtgtgcgattgtgtgcctatggatctgtgtaccgtgtgccattgtgtgatcggtccgctgtgggggtggggatctgagtgcggcgtgtcagtgtgcagtggagtgtgcagtctaagcttgcggctgtctccaggcagaagaggagaccccggcgcgggcgggggcgggttggcgccgggcaaacgccttgggtagaggggagaggacgtttcgttagttcccgccccttcctgactaaaattgcctacccgaagcgccccggagggcttcacgggaggagggtagactctcctttgcccccgcacccccacccccgctgcctaggggttttgggaaagccgcgggagtgggagggaatgcgggaggtgattcttccaaagccaagtctgcagctcgagcctcagtttccccatctggaattcgccttcccgctgacatctccgtagcgaagcctaagaaattggagggctcatcctcttcttgcgggggtcaaggggactgaaaggacgtgcaggaaatgagatccatcgcagactcagctcccctccctccttcctgtcggtgcttttccactcactcgcctgctctcccatctccccgccccctccgcctgcctcctcgaagcactgtgggattccgaggttgctgcagccagagaagctgcagaaaaacacggagctgggggtgaagggggacttaaaaggggaactacccggaaggacccaagaacacaaagacagagccactgcggttatctggctggtcagcaagggtatgcggcttcctccgcgctgcggaggctcccagagccaggtcacccattctgccagctcaagtctgttgtcatgggaaccaaaccttccaacttaagaatctgggggcgactttctagcgtgggaggaagggtggtgtgcacggttgctgagatggaagcagggttttgttactcagagccaggctgcggaggggcggggtgccgggcgcctgggttctattccaggcacagcagcagactggcagagcgcgtgagcagctgtggtttgtcccctaattggtatgtgtgcctataaagctctgaaccagaaaggcgtggcctccggggggacgggagggaggcggcaggcaacccatccccacacctcaggccatactgaggaggcagctgcccaggctccagggctatttaaaaggcttttatttccagttccagagcccgcccgaatgggtttgtggtcctctccaggcctctccctgtctatcctgggcctgctcattgctggtctggcttttttgtgcaggtcataacg

SEQ ID NO: 452 - DNA, 155845 bp, Homo sapiens
  source 1..155845: mol_type = genomic DNA
ataagtagattctaggagtaactttaataatttttaaattgcttatcatgacatcactattgagactttcttgatttccaaggaaaatataagtttttggagtcttttctcttgtcatcatgtgagcctctttcaaaggttgagttacttgggttctggactgatatgatttacgctgcttagtaaggtggcctcatccctattgctacaaattgctttcagatatttctgtcatcatgtggctctgggattattttatatgagggaaaatattttgtgtgtaggggatatacaacacttttgttctttgtgctttcatttaggttctgtgagaattcaaaattcatgaatgcatatgcttacacaaattagtgtaatttgataactggaagttgtagtgatagactgtggaatatgcctcaatttgacttacaaaggagagttttagtttctacatggttttgtattcatagaaagttgtggtgcaatacatagagtaagctggaatatgatatgatgcagttacctggcttggggagcagaaagcagaaataacaagtgaatgttgagagacaacttacatctgaggagagattgtttaaagtaattaagccataaaatataatttggaaatgctcaattggtctgaaactgtgtcaagcatattcaggtgttggcattaggaatatattccagaatgagagtgccacatgttttaaaggcctaggaaagcagtagataatttataacctaaaatcaaattttttaaaaaatgtgtttttgttagaatgggcagtgggtttcttttagcaaataacaattttgattaaacaaattgttgtatattcatattacggactactagataactatattatgggccactagataactataagaaataaataggaaagctctctatgtactgatatgatctttaagatataacaactaaaaaagcaatgtgcagaatatggtatgttgtatgcttacatttgtgtaaagaaggagacagaatatttataaaaatccgttgccctatacaagacatatctccggaaggatacctaagaaactttaacactcatttcccctgtgaaagcatttctcctcatctaaagcagagatgaaaggaagaacctatgctgaatgcatcttttgaatttggaactatatgaatatttcacatattttaaaacaaatgaagactttataaattaaaaaagaaaagaaaagaaaaaagttcttagcaaatattgacaagccattagtgcagtttcctgagaaaacctctgagcgtcgctgttggtcaaaagaacgaagagaagcgtttgggagcctcttagaggggaacttcctgcacaaaccaaccacacagagaaggccagtatagattcggaaacagaaaacaaaagcaggaaaagtgaccttagcccggattctgccatccccggaaggcttattcctcctatgggcaaaggagcaaagggagccagaagatgaaagcgagctcagggaggtgcgggctggtgcggtggctgcaggtactgttgcccttcctgttgtctttgttccccggggctctcccagtccagatccgctattcaattccagaggagctggccaaaaactcggtcgtaggaaacctcgccaaggatctggggctcagcgtccgggacttgccagcccggaagctgcgggttagcgcggagaaggaatatttcacagtaaacccagaaagcggagacttacttgtgagtgacagaatagaccgagaacagatatgcgggaagcagcctctgtgtgttctggatttcgatactgtcgctgaaaatccactaaatattttctacatagcagtaattgtgcaggatataaatgataataccccgctattcaaacagactaagattaatttaaaaattggcgaatccactaagccaggtacaacatttccacttgacccagccctggattcagatgttggtcctaactcactacaaagataccaccttaatgacaacgagtactttgatctcgctgagaaacagactccagatggtcgtaaatatcctgagttgattctaaaacactctctggacagagaagagcacagtttacatcaattggtcctcacagctgtggatggcggagacccacctcaaagtggcacgacccaaatccgaatcaaagtcacggatgccaacgataaccctccagtgttcagccaggacgtgtacagggtcaccctgagggaggacgtgccgccgggcttctttgtgcttcaagtgacagccaccgaccgggatgaaggcataaacgcagagatcacctactcctttcataatgtggacgaacaagtgaaacactttttcaacttaaatgaaaaaacaggagaaatcacgacaaaggatgatttggattttgagattgcaagtagttacactctgagtatcgaagcaaaagatcctggagatctagcagcccactgcagtatccaagttgaaattcttgatgacaacgattgtgcacctgaagttattgtgacttcagtatctactcccctaccggaggattcgccaccaggaacagtgatcgccttgataaaaacgagagacagagactctggagaaaatggagaagtttactgccaagtgttgggaaatgccaagtttattttgaaatcttcctcaaagaactattacaaactagtgacagacggcgctctggaccgggaggagatcccagaatacaatctcaccatcacagccaccgacgggggcaagccgcccctctcctccagcataattgtcaccctgcacatctccgacgtcaacgataatgccccagttttccaacagacttcctacatggttcacgtggcagagaacaatcctcctggcgcctctatcgctcaaatcagtgcctctgaccctgacttgggccccagtggccaagtttcctactccatcgtagcgagcgacctgaagccgcgggagattttatcctacgtgtccgtgagcgcgcagagcggggtggtgttcgcgcagcgcgccttcgatcatgagcagctgcgcgccttcgagctcacactgcaggcccgcgaccagggctcgcccgcgctcagcgccaacgtgagcctgcgcgtgttagtgggcgacctcaatgacaatgcgccacgggtgctgtaccccgcgctggggcctgatggctccgccctcttcgatatggtgccacgcgccgcagagcccggctacctggtgaccaaggtggtggcggtggacgcagactcaggacacaacgcttggctgtcctaccacgtgctgcaggccagcgagcccgggctcttcagcctggggttgcgcacgggtgaggtgcgcacagcgcgtgccttgggcgacagggacgcggcccgccagcgcctgctggtcgctgtgcgtgatggaggacagccgccactctccgctacggccacgctgcacctaatcttcgcggatagcctgcaagaggtattgccagacctcagcgaccgccgggagccctctgacccccaggcaaaactgcagttttacctggttgtggccttggccttgatctcagtgctcttcttcctcgcggtgattctggcaatctccctgcgcctgcgactctcttccaggtcagatgcttgggactgttttcagcctggtctcagctccaagcctggacctggggttctccccaattacagtgagggtacattgccctattcctacaacctgtgtgttgcctcacaatcagccaagacagagttcaattttctgaacataaccccggaattggttcccgcgcaagatctcgtctgtgacaatgcctcttgggaacaaaatacaaatcatggagccgctggggtcccttttgcctcagatactattttgaaggtgagctttaattaatttattttcacttctggttttattgtttcacctaatttgggtaggaagttccactgcgtatttctttgtctgtgagttagatttggccaatgttgtgccttaattgtcttaatcttatctaactgaattttaagtgttttctctctgaagtgtgagatttatttacccatgattgcaaacctttatcacatgagatattgcactgtatttctttttcttcctcatctttacattacttctctctgcagatttgttgctattgagactttaggcaattagtttcaccttcaggctctttgttattcaaattttagttttacttcctcttagaatcataatacttcagagtaaagagagtcttcattttagtaggctttggaaattgggaaacaaagaagaaagacttttgcataatggcatggcttgttaatcacagggcatgggtaggacattgtcccattgacttgaagaccaacactcagtaagctaaatgtcttggaatcacaaatgtatttctaaaggacaggcaatgtttgaggtctgaggtgtctgctagaaagagtgcatttaacaaatgtgagaaatcattctctaacatgcattttaacaaattgctcttaagaaaaactacacattgagaaaaatcttacaacctatgttcacatcattttctacaaaatattacttaaaactttgcttttgaatttcctaattatatagaatttttattttcttagttttctatgaaagtgttattaaataaaatgactttctgaaatgtccatttttttcaatcaagaggtttttctatttctgttgtcatataaagatgatagcagtaaatatctgtctcaacatagaaaggtcactcagtacttctcgacaagtatctgctcatgctttcctgcatggatgatgaaataaaaccccatcctccacagttactatactggttgtcactggaactacaaatatttgaacatggtaatagaaaaacataaaaatgcatagttaacccaactcaaacgctgtctgagatagtggagagactttctcaaagtcctcacaagtaacaaagatctttatttcttctgcatatgacagctaatataacttacataaatcagtaggcctgtttggaaaggtgcatggagaactgggtttgtttccttggtattcttatatgcaaataagcacgttttcctaaatttatcctaataaggagatgaaatcttgaatcctacaaaggtaagaatttgaatgtcctaatttaatggactaaatatagataagaggtaaataaaggacataggctcccccgatgacgcattaaataaaatttttgtaaggtattgagatctaataatcatattgatctcagggattgtggaagtcttgctattcagaattaaagctgaattaacggtcataaacaacgctacacagttaaacattaaggatatggcaacattattagaaataaaattataactaaacttaggagaaataaaaatggaatttgatgcagtcactggttaggactctgagtgtcgctgttgaccaaagtgggaaagaagctgccgcagaggcgacccgactctgctccctccatactaaacacacagaccagacaagctcctacgaaaagccaacgctccacgcccattttcgtcagggaatatgtacccatcggctttagataaataaggaaacagcaggctgaaccagaactaagagaaaattgggcagagagaaggcaatggcgagtccacctaggggctggggctgcggagagctgctgctgcccttcatgctcctggggacgctgtgcgagccaggatccgggcagatccgctactcgatgccggaggagctggacaaaggctccttcgtcggcaacatagccaaggaccttgggctggagccccaggagctggcggagcgcggagtccgcatcgtctccagaggtaggacgcagctttttgccctgaacccgcgaagcggcagcttggtcaccgcgggcaggatagaccgggaggagctctgcgctcagagcccactgtgtgtggtgaactttaacatcttggttgagaacaaaatgaaaatttatggagtagaagtagaaataatcgatattaatgataacttcccgcgtttccgggatgaagagttaaaagtaaaagttaatgaaaatgcggctgcagggacacggttagtgcttcccttcgcgcgggatgcggatgtgggtgtgaactctctccggagttaccagctcagctccaatctgcacttctctctggatgtggtaagcggaactgatggacaaaagtatccggagctggtgttggaacagcccctagaccgcgagaaagagactgttcacgacctcctcctcacagctttagatggcggagacccggtactctccggcaccacgcacatccgtgttacggtcctcgacgcaaacgacaatgcgcccctgttcaccccatccgagtacagcgtgagtgttccagagaacatacctgtgggcactcggctgctcatgctaaccgccacggatccagatgagggaataaacgggaaattgacctactcttttcgcaatgaagaagaaaaaatttcggagactttccaacttgattccaacctgggggaaatctcaactctacaatcactggactatgaagaatccagattctacctcatggaagtggtagctcaggatggaggcgctcttgttgccagcgctaaggtggtggtcacagtacaggacgtgaatgacaatgcccccgaagtgatcctcacctctctgaccagttcgatctctgaagactgtcttcccggaactgtaatcgcgctgtttagcgtacatgatggtgattctggagaaaatggtgagattgcatgctctattcctaggaatttgccttttaaattggagaagtcagttgataattactatcacctattaacaactagggacctggacagagaagagacttcagattataatatcactttaaccgtcatggaccatggaaccccgcccctctctacagaaagccacatccccttgaaagtagcagacgttaatgacaacccacccaatttccctcaagcctcctactccacctctgtcacagaaaacaatcccagaggtgtctctatcttctctgtgacagcccatgaccccgacagcggcgacaacgctcgagtcacctactccctggctgaagacacatttcagggggcgcccttgtcctcctatgtatccattaactctgacaccggtgtcctgtatgctctgagatccttcgactatgagcagttgagagacctacagttgtgggtgacagccagcgacagtgggaaccctccacttagcagcaacgtgtcgctgagcctgtttgtgctggaccagaacgacaatacgcctgagatcctgtaccccgccctccccacagacggttccacgggcgtggagctggcgcctcgctccgcagaacctggctacctggtgaccaaggtggtagcggtggacaaagattcaggccagaacgcctggctgtcctaccgcctgcttaaggccagcgagccaggactctttgcggttgggctgcacacgggcgaggtgcgcacagcgcgagccctgctggacagagacgcgctcaagcagagcctcgtggtggccgtcgaagaccatggccagccccctctgtcagccaccttcacggtcaccgttgccgtggccgacaggatccctgacatcctggctgacctaggcagtatcaagacccccattgaccctgaggatctggacctcacactctatcttgtggtggcagtggctgcagtctcctgcgtcttcctggccttcgtcatcgtgctgctggtgctcagactgaggcgctggcacaagtcacgcctgcttcaggctgaaggcagcaggttggcgggtgtgcccgcctcgcactttgtgggcgtggatggggttcgggctttcctgcagacctattcccacgaggtctccctcaccgcggactcgaggaagagtcacctgatctttccccagcccaactacgcagacacgctccttagtgaagagagctgtgagaaaagcgagcctcttctgatgtctgataaggtagatgcaaacaaagaagaacggcgagttcaggttagttttctctttcggtaaggatgaccagaacattttcatttgtttcctttttcatgtttctgtcatattcagaatcagctagttatgtaaatagtggaacattatttgctgtattggagattaattttttttatataattcatgctttctccatttgttttcaaattctgttttgggaagtctagctgatatctgtagacttaagtgaaacaaataccttaaaggaaagtggttaaatataatcattttacccaaatattttgttatattggaactgcagttctattaatagaaaagatgttttatttattcaaattgttagatatattgttctcttttgagtgtctgcctagacaccattagtgaatgtgttttggaaaggataatgtataggactgatattttagtctacctgaaatttgtttaaggaaataatttacagtatttacataaatcagtggaaaggtacagagaacttctgggtcataaatatcagaaaagaggccgggtgcggtggctgacgcctgtaatcccagcactttgggaggctgaggtgggcggatcacgaggtcaggagatcgagaccatcctggctaacacggtgaaaccctgttctactaaaaatacaaaaaattagccgggcgtggtggcaggcgcctgtagtcccagctactcggaaggctgaggcaggagaatggggtgaacccgggaggaggagcttgcagtaagccgagatcgcgccactgcactccagcctgggagacagaacgagactccgtctcaaaataaataaataaataaataaataaataaataaatatcagaaaagtagataaaatttatattaatgataacatgtagcattctaaagtctggaaagtttgtgttaagccatgtagttattggatatgtgggcttgttgagagaagaaatcagtgtaaaggaaccttaaggttgggcttcgttctgtgatgtaaagcctccagagagttacatactgctgcactcaataaatgtaaatatgtcacacacctggcatcttctgttatagataaaccctttacttattagaatcaatacctactgcaatgttagcgtttctttaagtgtaggtgcaattcttctttattacttgagtttaaggttgtatttgaaaaaaaaagaactcaacttaaagatggttcaaaattttaaatttcatatctaacgtatgtgctcatcttaaattaatagatttgtcttaatgaaatactggcctatgtgcctcaaattccaggaggatgtgttatgtaatgaaagaactactatatttcccttctgcatctgatttgctgaagatgattttcagatgtttcttattaaaatattcttaatccttcaaattttgtacttttaaaaccttgagcatcagcttcaaataatgactaaataaggggaaaaggtaataaaatattacaaatgggatagtaagctacattactcaaccacatgaaaggttaattgacacattaaagaacctaagaccacttgatttttattttttaaacactgttaaagagcattcaagtatatctatatctatatacatatacacacacatatatatacacacatatatatacacacatacacacacacaaacacacatacatacacacatggacattctgaccaaaatgtaaaatgtacaaactcaccgaatagtgaatgcatccaaagagtaacaagagaatctatacagtaggtgtcgacattattcactcctatgtgaaaacttgcttttccattttttttaaaagaaaatgttatatgcttcttagggtaaggtgtttgggaaaaaagtaaaggttatagatttgggtacatttcttctgagttaaatgttttgtgcaatggaaaaatatctttaaaccctctataaactactaacagactataaaatgcttgatccatacattttgaatgtatgtactgtatataccatatacttttaaatatctgaatctttagttttatatgtgttctgaagaataatttttcatactaattgaagtgttcatacaatgaacacttggcattgtgttggaaggcacttgctttggaatgttttggagcaaagtcttgagtcagttatatttttgatgtttgtataaaggtgacaatgagtgtctgtctagaattctggttactgtgagtagtttaagatgctataatgcttttccactataaggtgaattcggtgtggaactcattgcttattgctgcacacttgcctagttttagagtaacaatacattatgtaggctaaagataatttctttaggaagattttctggtttgaaaatggaattaaaactgtaagacacctgtcagaaacatggaaaatggcatgttattgaccagggaaaagtgtaaataacaaaaagttaggattatcagatggtaaactggggaccaaggaaaagtggacaggaagattacttatataattaaataatataattataaggacttacaattcactccccaatcctaataacgcatcattgttaggctacttgagaagaaacagtacatttcaggacaattgtgatgtagtatgaaaaaacatcctttgtaaaagtttttcatttgggccagggtggttcatgactataatcccagcaatttgggacgctgaggtgggaggattgcttaaagccaggtgttctagcccagcctgggcaacatagtgaaaccccacctctatagaaaaaaaaagttttcaatcatacttatttaattaaaagtagacacttggaaacaaaggaaaagagaccctcttgctttttactatacttctattttataaggtcaatcatttcctcattacctttaacttcttttggggggagataataaagataaaagagaagaaagtgaaacatagaataaaactaaaagctatgacattataacttttagaagttagaagtaaaggaaatagaatgcaataagaatacacgtgaagctgatatttcaagcctctttatactacgtcttctgccatcaccaaaaatagcttccatttgtatgattttctatgtattattttatttggccctcatttctactagagtaagcagagaagatattattatgaccattttatgaaaatggaaactaaaaacgtgacgggattgagcaagattatctctgccctttgacaagtaaaaggtacttgatttggatggataaagctcaaattaaaagaaataacagactaaagatatagtaagtatatttaatgttttttaaaagtccttttaaaatgggaagaaagtatcactatcagtacactgccgatttttctcctaactagctccttatttggagctgatttagtcaccattactgcagttctgcagcagaggcgccgggtgccgctcttggctagtgctgtgcaaaatattggctcctcccgctgcagccagctcggaagaaaagtgcactctctatcaggcttcctgcagcggagacacccattagagaacccaagcacaaagacaaagcaaatagttggtcctgctcggagaactcttgggattatttaaagatctcctctcctcggatttagaaaggcaaaggcgcagagagcgggatgggaaatagctccggatggaggggcccagcagggcagaggcgaatgctatttctcttcctgctctctttgttagaccaggttctctccgaaccgatccgctacgctattcccgaggagctggacaggggctcgctggtagggaacctcgccaaggacctggggtttggcgtgggggatttacctactaggaacctgcgggttattgcagagaagaaattctttaccgtgagccccgaaaatgggaacttacttgtgagcgaccgtatagaccgagaggagatttgtggcaagaagtcgacgtgtgttctggaatttgaaatggttgctgaaaagcctttaaacttttttcatgtaactgtgctgatccaggatattaacgacaacccaccgacctttagccaaaatatcactgagctggaaatcagcgaactggctctcactggagccacatttgccctggaatctgcgcaagatcctgatgtaggtgtcaattcgctgcagcagtactacctcagccctgatccgcacttctctttgattcagaaggagaacctggatggcagtaggtacccagagctagtactgaaagcacccctggacagggaagagcagccacatcaccacctggtcctcacagctgtggatgggggcgagccctccagaagctgtaccacccagatcagggtaattgtcgcagatgcaaatgataaccccccagtatttactcaggacatgtacagggtcaatgttgcagagaacctgcccgctggctcctccgtattaaaagtgatggccattgacatggatgagggcatcaatgccgaaatcatctatgccttcatcaatattggcaaggaagtgagacaactgttcaagctggacagtaaaacgggggaactcaccactattggagaactggactttgaagagagagatagctacacaattggggtggaagcaaaggatggtggacatcacactgcatattgtaaagtacagatagatatttcagatgaaaatgacaatgccccggagataaccctggcttctgaatcccaacatatacaagaagatgctgagctggggactgccgttgccctgatcaaaacacatgatctagattctggatttaatggagaaatcctatgccaactaaaaggaaacttcccctttaaaatcgttcaagataccaaaaacacatacaggttggtgacagatggagccctggaccgggagcagatcccagaatacaatgtgacgatcacagctaccgacaaaggcaatccaccgctctcctccagcaagaccatcactctgcacatccttgatgtcaacgacaacgttcccgttttccaccaggcctcctacaccgtgcatgtagctgagaacaatccgcctggagcctccattgcgcatgtcagagcctcggatcccgacttgggacctaatggccttgtctcctactacatcgtggccagtgacctggagccgcgggagctgtcgtcctacgtgtccgtgagcgcgcggagcggggtggtgttcgcgcagcgagccttcgaccacgagcagctgcgtgccttcgagctcactctgcaggcccgcgaccagggctcgcctacgctcagcgccaacgtgagcctgcgcgtgttggtggacgaccgcaacgacaatgcaccgctggtgctgtacccagctctggggcccgaaggctctgcgctcttcgatatggtgccgcgctctgcagagcctggctacctggtgaccaaggtggtggcggtggacgcagactcgggatacaacgcctggctgtcctaccacattgtgcaggccagcgagcccgggctgttcagcctgggcctgcgcacgggtgaggtgcgcacggcgcgtaccttgggcgacagggaggccgcccgccagcgcctgctggtcactgtgcgtgatggaggacagcagcctctttcagccaccgtcatgctgcacctaatcttcgcagatagcttgcaagagatacaacctgaccttagcgaccgccccactccctctgaccctcaggcggagctacagtttcacctagtagtggcgttggccttgatctcagtgctcttcctcctcgcggtgattctggcaatctccctgcgcctgcgatgctcctccagacccgccactgagggctactttcagcctggtgtctgcttcaagactgtacctggagttctccccacctacagcgaaaggactttgccttattcctacaatccgtgtgctgcctcacattcctcaaacaccgagtttaaatttctcaatataaaggctgaaaatgctgcaccacaagatcttctatgtgatgaagcctcttggtttgaaagtaatgacaatccagaaatgccttctaattcaggcaatttgcaaaaggtgagtttcttcaaacctttccttccataaatataattgggtttcaattcattgatttagagataaaaagaatacagattaaatattccctgattacattattttattgattttctggtgtagagtagggtgtctaggaaattctttgtagaatttcctgtagaatatctgtgttgcagttgttctttcatagaaagcctccttttgatagtcttgaaacttttcttaatcctaatacactataatctgaaacatttttaatacagtattatctcacactgtcattttcagacatatctatccagaattagacccaaatcctcacaattaagtggtttacttagttttaatgcagtcaatcctaaaatatatgaaacattatgtatatcttaacacatttttaatgtaacctgtatataatatttttacttccctttgcatgtttttaaaagtatacacagatgttgcctatgtcagggcagtttttaacttctatgctaatcaaaagaaataatggcatctaaaatggcaactcttgtaatgggcactgtaatgaattggttcaaaatgtgtttgtgtagcatatgcctgtagtcccagctactcgggaggctgaggtgggaggatcccttgatcccaggaggtagcagctgcaatgagctataattgtgcccctgcactctagcctgggagacagagcgagactttgtctccaaaaaagtgtttgtggttgttggtacccttactgaaaatgggactagcataaatggtggtgaaatgtgatgataattcaaaatttacagaagattgtaatattatttctgttccccaaggtcctaagagatattttcataaaaatgaatggtaaacttcagagaacatttaaaattattcaaaataatctcttacactcttctaaatgcttcattatcttggggagggaaatattatgagtgtcatctctgcagatttagcagaaataaaatcctctgtgtgatagtttcacaaaacgatgcagtattaagttaggactctaagcgtcgctgttgaccaacctgggcaagaaaatcaacggaaactcaagttacatcctccaacaacaaagcaaattagacgggaaagcaggaaagctgtgcagaaattctgacctgaaacgcttcgcatccggtctctgcttgttgaaggaccttcaccgctatttctgagaagagcaaaagtgatgcagatctgttcttcctcttcttaatcccagagaagttcctaataagccagtaatggcgcctccgcagaggcatccgcagcgcagcgagcaggtcctgctcctcacgctcctggggacgctgtggggggccgcggcagcgcagatccgctactctattcccgaggagctggagaaaggctccttcgtaggcaacatcgtcaaggatctgggactggagccccaggagttggcggagcacggagtccgcatcgtctccagaggtaggatgcagcttttctctctgaatccgcgaaacggcagcttggtcaccgcgggtaggatagaccgcgaggagctctgtgctcagagcccgcggtgtctggtgagttttaacatccttgtcgaggataaactgaatctttatcccgtggaagtggaaatagtggacattaatgacaatacaccccgattcttaaaggaagaattggaagtgaaaattctcgaaaacgcagctccatcctctcgttttccactaatggaggtctatgaccctgatgtgggaatgaactcccttcagggatttaagctcagtggtaatagtcacttctcagtggacgtgcaaagcgaagcccatgggcccaagtacccggagctggtgctggagggcacactggaccgggaaggagaagccgtttaccgcctggtccttactgccatggatggcggcgaccctgtccgctcaagcgtcgcccaaattctggtaacagttctagatgtgaatgacaacactccaatgtttactcagcctgtctaccgtgtaagtgttcctgaaaacctgccagtaggcacaccagtgttggcagtgactgccaccgaccaggatgaaggagtccacggggaagtaacttattcctttgtgaagattacagaaaagatctcacaaattttctgtttgaatgttttgactggagaaatttcaacttctgcaaatctagactatgaggactcgagtttttatgagctgggtgttgaagcccgggatgggccaggtcttcgagacagagcgaaagtcttaataactatcttggatgtcaatgataatgtaccagaagtggttgttacatctggaagcagaacaattgctgaaagtgcacctccaggaacagtaatcgccctttttcaagtgttcgatcgagactctggcctgaatggcctggtaacctgttccatcccgagaagtctcccatttgaattggaaaaatcagttggcaattattatcgattagtgacaaatgcagctctagaccgggaagaggtattcttgtacaacatcactgtgacagccacggacaaaggaacaccacctctgtctacagaaacaatcatctctctaaatgtggcagacaccaacgacaacccgcccaccttcccccattcatcctactcagtctatgtccttgaaaacaaccccaggggtgcctccatcttctctgtgaatgcactggaccctgacgtggaccagaacgcccaagtctcctactcactggcagaagacaccctccagggggcgcccctgtcctcctacgtgtccatcaactccgacactgggattctgtacgccctgcgctccttcgactatgagcagttgagagacctacagctgtgggtgacagccagcgacagcggggacccgcctcttagcagcaacgtgtcactgagcctgtttgtgctggaccagaatgacaatgcgcccgagatcctgtaccccgccctccccacagacggttccactggcgtggagctggcgccccgctccgcagagcccggctacctggtgaccaaggtggtggcggtggacagagactcgggccagaacgcctggctgtcctaccgcctgctcaaggccagcgagccaggacttttctcagtgggcctgcacacgggcgaggtgcgcacggcgcgcgccctgctggacagagacgcgctcaagcagagcctagtggtggccgtccaggaccacggccagccccctctctccgccactgtcacgctcaccgtggccgtggccgacaggatccccgacatcctggccgacctgggcagcctcgagccctccgccaaacccaacgattcggacctcactctgtacctggtggtggcggtggccgcggtctcctgcgtcttcctggccttcgtcatcgtgctgctggcgctcagactgcagcgctggcacaagtcacgcctgctgcaggcttcgggaggtggcttagcgagcatgcccggctcgcactttgtgggcgtggaaggggttcgggctttcctgcagacctattcccacgaggtctcactcactgcagactcgcgtaagagtcatctgattttcccccagcccaactatgccgacacgcttatcaaccaggagagctatgagaaaagcgagcctcttctgataactcaggatttacttgaaacgaaaggagaacccaggcaacttcaggtgagtttctttccgcctaagcgggaagagtaatctgatcttcccgcaacccaactaatcagacaggctcatcagctagatcggctgttatagaagcgaacctcttttggtacaggaagattcgtgattttgtaaagtggaagactcccttgttcaggtgagggtatcgtttttttttttttttttttttgagacggagtctcgctctgtcgcccaggccggactgcggactgcagtggcgcaatctcggctcactgcaagctccgcttcccgggttcacgccattctcctgcctcagcctccctagtagctgggactacaggcgcccgccaccgcgcccggctaatttttttgtatttttagtagagacggggtttcaccttgttagccaggatggtctcgatctcctgacctcatgatccacccgcctcggcctcccaaagtgctgggattacaggcgtgagccaccgcgcccggccgagggtatcgtttttattggttgacaggaaaattcaagattgtctttgattagtgcttagttttcttagccctttgcagagagtcacataattctaatgtttttcttttatatcaaaagaatgttctgaagtcttaattttgtgggggaaaataatgcatgtcctagtttttctttacctttctcttcttggcaaactatttgtgtcttggattgagtacatctcgtttcttaggttttttcctactatgtgacatttgtaaggttctttctttttctaatgtgggaaaaaaaataaccttaatttaggtcagtgttaaagatcaagatcttggttttagctagcatggtggttcacgcctgtaatcccacctcttcaggaggctgaggcaggaggatcccttgagaccaggagtttgagaccagcctgggtgactctgtctctaccaaaaagaaaaaaaagtagccagatgtgtggcgtacacctgtagtcccagctactcgagaagctctgataggaggattgcttaagtccaggggtatgaggctgcagtgagatataattgtgtcactgcaccctagcctgggagacagaatgagactttttctctctctctctcaaaaaaaaaaaaagattttgttttttctcagtgttacttgataactataaacgacagacgttcatacaagagatctttcacctttactacttaggaatcaaaaattatttttgaaaagataagaatcattggtaactgcagcaggggacaccagatctttggtgttaaaagacctgaataacattcctgtaactatctgttatttacttgggccagttacaatcgccattatcttccaattaaaattaagatttaaaagacttctcttatcagagataggatccccctctgttgcccagtctggagtaaaaatccacctgtaactgctgcttatagagtgtgtatccagggcaacttgaatctatgttcctgggttgcaatcctaaagcttggctcaaataagctctacttatattattttttaaaacaagactttccttatctatctgactcaaattctaagaaaataattttataactttttttcaaactctaaagcagcatagtgaacacgtatttgttgacatcaccattattataattattgggttgttaacaataactaagcaccgatgctgtgtgcctactacagtgtcttttgcatactgtgtgcctgatagtatttaagagtgaaaatggccgggtgcggtggctcatgcctgtaatcccaacactttgggaggccaaggcaggcatctcacgaagtcaggagttcgagaccagcctgaccaacatggtgaaaccccgtctctactaaaaatacaaaaattagccaggtggggtggcatgggcctgtaatcgcagctactcgggaggctgaggcaggagaatcgcttgaacccatgaggcagaggttgcagtgagccaagatcgtgccactgcactccagtctgggtgacagagcgagactctgtctcaaaaaataataatgataattaataaataaagagtgaacatgaattttaaaacatgctcggtagtgtctgcttacaggacatatctctaaaaatagatgactgactggtgaatgggagaacaaatgttaatgaggttcaaataaaaatttaaatattttagcattttaacccagacaataaggctttcatcatataggaactctttattgaaatatttcaagaaaaaagggattatcatttagaagactgattagtcttatttattatgactgaaatgtgcaaacagaatcattgtttcatgaacagaaaacagcagagtttttgactgtcaatgatgttcgaatagaaaatggatcactaaggagataggagattctgttatcgacagtcttcaaaagtaagttgatggccctggaatgaatggagtacaggggattctctaatttgatgacttgttgaactacattatagtcaagatttttctccagtcatgagttggaagattctacaatctggtggtattatagaatggattggccacttgtgcatctgaatttgttatgaatgtgtaagaaaaaagcaattgagaagataccttgaaaataaatgagaacctcctttgtaacctgactttgtcagtcttcttaaagataacattgagttgatgtgtttttaaataagctgctaagagtaatatgtgtttttctgaaccaatattgtggtatttacatttaaggaattgttatagatttatttatttcaagtttccaaaggtatatacctaaacaagagatctaatcatacacatcttcaaagctcattttcttgtatctttgtgatataatttgataaaataacaattttaaacaacttgaatcttggatattagtctcatgagttagatgggctgttatacatatgattatttcataaactctgaaagtgtgaatgttattttactatactaccaatttgggatgttaaactacatcttgagcatttgttgttatagggaaagctcactaactacttttcatggagatcaggctggtttattttattctcttattacctgtgaccatttcatttaaacaaataaaatatttctctgatggaaaaactaccaacttctactctcacaaaagtcattcactcatgtggactgaccaactgttaaacatcctggcagtcatggaatttgctaagttatggctaaatgaggttctttaatccacctgcaatacagatcattaataataagataggctatctgaggttttgagagttcagtatagaattttgaagcatcaggaaaaaaaactaccaaattattgtcttattcttattttatggtctgtgaaagcctcttttttttttttttttttttttttttttttgtcagagtcttgctctgtctcccaggctggaatgcagtggtgtgatctctgctcactgcaacttcctcctcctgggttcaagcgattctcctgcctcagcctcccaagtagctgggattacaggtgcatgccaccatgcctagctaattttcatacttttagtagagatggggttttaccatgatggccaggctggtctcaaactcctgaccttaagtgatccacccgcctcagcctctcaaagggctgggattacaggcatgagccactgagcccggcctgaaaggcattcatttctgatcaggcttctgttgaggtggcaattgtcaaaggggaaggagtaaaatctcagaggagaaacattggaagatacctatatctttgcttgagaatgaaaatctaaatggaacttcaaagaactgttttgttgtttgttttttagaaaaaaaagtcccaaaaaagaaaagagagaagataatcaattcgatgcccaggaagccaaatagactttacatagaattctttttaatgcaaccaaacaaatggtcaggattcttcccaatatctcagtcaacaataatatacactctttaaactatgaaatgatttcaatttgatacaatgagcttatgttagattttattaaacatatcttggcggtctagtaaagatctttaatatttaattttatgatgttcgataacttagaaaatgtgaatgctagagacaatgaagccatttactccatagggtatgtatgctttgtgttcggagtagtctataatttaatttaactagctcttatttccttttctccaaagaaggtaccaagacactataaattaattgagacttttttaaaacagtagaataagaaacaaatgtgagatgaaactatgaattttgaggcatcaggtaaaaatggatcaagacattgagagctataacctccaaacatgaaagtttgtttgaaaatatctacaagtgcttacattgtttaataatcatacactttgcttgcctcaacaagaagttcaaaagtactattaaacaaatagaatttaactccagtttacagaattcatctataatacctctattagttcctttaaacaaaatttatctactttgtgaatgcaaagataactatggattattttgatagatcaaaacagaatgtccttcaaagtgttccctgtattctggagcaatgccaccagaaagcagaaataggttacttaggagcctcccacaaaacgaagttaagctttcttagtgttagttctggattctcctcctggttccaccaactactctccaggacctagaagaatttacaaaccaagactgtttcttgccaggtctttattccagagcaggtcattctcttttattctgcaactatgtgaaaggagctttcttttctttctgctagcagagggtagcctcggatccatcaataatttagttttactctatcaacatcagtggagagacgagtacctctaaggatcctgtcaggacagtcctgcattttgctcaaatgctgtctagagatccctgttttctcaattacactagaatagagtaggatgaagatttgaattgcatactaggatgaagacttgaattgaattgcataatgaaaagaatcagccaatccattatccagtttcttatgaattcacagcccagtaggatctctgcagatttctgccttctgtagaaaatgggttgcttctatagctgattgctgcagccaagacaaacaacgatttctttctttttttctcacaagactgggagtgagaatatttggattccgacattgttctactactatataatcaataatcaggaacaaggcaaggcaattccctctttctttctttctttctttcttcttcttttttttttttttttttttttggcagagttttgctcttgttgtccaggctggagtgcaatggtgtgatctcggctcaccacaacctccacctcccgggttcaagcgattttcctgcctcagcctcctgagtagctgggattacaggcgcgcgccaccacgcccggataattttgtatttttagtagagacggggtttctccatgttggtcaggctggtctcaagctcccgacctcaggtgatccgcccgcctcggcctcacaaagtgtgggattacaggcgtgagcaacagcacctggccccccctctcattttttaaacggttaaaatgaaggtgttagaccgtctctaaggttctatacaatcaaaaatttattaaaataggtctatatattttacaacaattttgactttctgaatcttgcatcatggtgtctagaacatatgtgttcaattaatactgaattaattaaaatttatatacactgatgtaaatattttctaagtaaaatctttcatatgtatttaaataaaatttacctttttgccttcaataactgattttcccatgtgcaataacgtgtgagtcagtgcccaaaagagtcacttgaaagttgcaaggcaaagcagttttttaaaaattatctaagattatcaaacaccggtccatgaacactgttgcattaattcagtgtcttaaaatggatttttaattatcagggatatctagagcaaagaaatctaacagggaaattttgaaagatgaaacaattttctatgaaatcagtgtattgtgtgcatcaatgtggtgcagtaacttagtaaggactcacagcgccgctgttcaccaaccagggaaaaatggtgcgagagatcccacagaaaccaccgagttttacagcacagagaaacgacagattgcgataagccctcttccaggctgcactaaactcaagcctctatcctgctggattctgagctccccttcctaagacagaggggtccacccggatacacccgcattctgaagcacttcccgagatcggcgcctaagcaagagaagcaggacgactatggcggctcagccgaggggcggggactacagaggattcttcctgctctccatcctcctggggaccccctgggaagcctgggcaggacgtattctctactccgtgtcggaggagacggacaaagggtcctttgtgggagacatcgccaaggacctggggctggagccccgggagctggcggagcgcggagtccgcatcatctccagaggtaggacgcagcttttcgccctgaaccagcgcagcggcagcttggtcactgcgggcaggatagaccgggaagagatctgcgctcagagtgcgcggtgtctggtaaactttaacatcctgatggaagataaaatgaatctttaccctatagacgtggaaataatagatattaatgacaacgttccaagattcttgacggaagaaataaatgtaaaaataatggagaatacagctcctggggttcggtttccgttaagcgaggctggggatccagatgtgggcacgaactccctccagagttaccagctcagccccaatcgccacttctccctggctgtgcaaagtggagacgatgaaactaagtacccggaactggtgctggagcgggtgctggaccgggaggaagagcgggttcaccacctggtcctcacagcctctgatggcggcgacccgccccgatccagcaccgcccacatccaggtgacagtggtggatgtgaatgaccacacgcctgtcttctctctgcctcagtaccaagtaactgtccccgagaatgtgccagtgggtacaagactgctcacggtacatgctatcgacctggacgagggagtcaatggggaagtgacatattcttttcggaaaataactcctaaacttccaaagatgtttcatctgaactcgcttacaggagaaatatcaactttagaaggattagattatgaagaaactgccttctatgaaatggaggttcaggctcaagatggtcctggtagtctgacaaaggcaaaagtactgatcacagttttagatgtaaatgataatgctccagaagtgactatgacgtctttaagtagctcaatccctgaagacacacctcttgggacagtcattgctcttttctacctacaagacagagattctggaaagaatggtgaggtgacctgcaccattccagaaaacctaccttttaaattagaaaaatcaatagataattattatagattggtcacaaccaaaaacttggaccgggaaacactctctttgtataacatcacactgaaagccacagatggtggaactcctcccttgtccagggaaactcacatattcatgcaggtggcagacaccaacgataacccacccaccttcccccactcatcctactcagtctacatcgctgagaacaaccccagaggggcctccattttcttagtgactgcacaggaccacgacagtgaggataatgcccagatcacttattccttggccgaagacaccatccagggggctccagtgtcctcctatgtctccataaactctgacactggagtcctgtacgcgctgcaatcctttgattatgagcagttgagagaactacaactaagagtgactgcacatgacagcggggacccgcctctcagcagcaacatgtcactgagcctgttcgtgctggaccagaatgacaacccgcccgagatcctgtacccggccctccccacagatggttctactggcatggagctggcaccccgctccgcagagcccggctacctggtgaccaaggtggtggcggtggacaaagattcaggccagaacgcctggctgtcatacctcctgcttaaggccagcgagccaggactctttgcggttgggctgtacacgggcgaggtgcgcacggctcgggccctgctggacagagatgccctcaagcagagcctcgtggtggccgtccaggaccacggtcagcctcctctgtcagccaccgtcacactcaccgtggctgtggctgacagcatccccgaagtcttggccgacctgggcagccttgagccctccgacggtccttacaactatgacctcacgttgtacctggtggtggcggtggccacagtctcctgcgtcttcctagccttcgtcctcgtactgctggcgctcaggctgcggcgctggcacaagtcacgcctgctgcaggcttcagaaggtggcttggcgaacgtgcccacctcgcactttgtgggcatggacggggtgcaggctttcctgcagacctattcccatgaggtctccctcaccgcggactctcggaagagtcacctgatcttcccccagcccaactatgtagacatgctcatcagccaggagagctgtgagaaaaatgattctttgctaacatccgtagattttcaggaatgtaaagaaaacctgccaagtattcaggtgagcccagcccttcctttatttccatgaggaatttatttgcatgatatttctctattattttgcaaaacaaatgttttgaaaatagggatttaaaaaactttatagaggtaaaaatgagtttaccagtttccttcagtggtgacactttaatatagaacacataggatatagtatttctttagtgaaagcctatggacaagattatgaatatgtggactatcacattttataatttccacctactttccaatctatgttccaacctactttcttaactcatatattttatacattggaatgaatcgagtctttcatattgcacaaggttagcaggaataaaacacacctcagctgtcttctcaggattctctttagcattcaaatatgtaaaaggttctgaaagatttcttccatgtgaagatttttttctgtggctgattctgcctccatgtacctcagcttggtggtcctaaaaaatcttgattgcttcttgacctatttacagtataatcatttattaatggggtggtagtagaaggttggatttatgcctaaagaatgaaatgtgtgtgtatcacacttcactaagatctatatcaaagacagacatcaagtctaatgccacactaaaggccatcggacaaaaccaataaaatatgtcaaataaaatgtcattttaagtgttgtaattggcatttgtgacataggcaattacatgttttaacagagaattccagtatgttgttttagtggtacagccagatgaagtgtgtctgtgggctatcaaagtgggagattggggatactggctttgtttcaactgtctcacgtactcaaaccttagaccatcttatgtacacagatcctagaccagtagttgattttatttattaggtctactgaaaaattcagttggaaataacccaatctgggattaactacttccatattcttttgtataacattttagtaaagctcagtatatcaagtgattgtcatccagaaggggtggatgacaaggtaatcttgattccagagacctttgagtattaattaaaaacacacttttagccaggtatggtgttgcaagctgtagcccacctgcatgggaggctgaggcaagaggacagcttgaacccaagaattggaggcccacctagataatataacaagactctgtctcttcaaaaaaagactctttttagactagtgttgtatttggtagtattttgcacatgatagactctgtacaatagtgtgggggatacattttttttttttgacatggagtctcgctctgtcacccaggctggatacattttacaagttctgcagtgttcacatttcagatgtacaatcacttggggtagaagacaatgttgctgacaccaacaatgttactgagggaagatcctatggcagaactacggttataaggtattttgtaaaagaaaatctcctgaccaaaatttattagatgcataaaattgtttttaagcaatggagagacataatcactaaactcagtgagctattgcaatcaaactttccagggattgtttccttcaattcagaggtcaccaaggaatgtaaaataagtgcagaggtaggaagcagtgcttcagtgcagcagatctcagtgactttgtgttttgaggctatgtattatccccctgataactttgaagatgaatgttgtatttcataaccagtaaaataattgtgtaatgaggagaggagtaggctactgcctgtgatcatcgaaatgagaatcacataatattcctgtaatgaaatcactgaaactattgggaagggggtgtatttgaagataagtataaattgcaccttctaaaaggcaattttggtattactgatactctccggaaaaagttgaaataaatcaacttggaggtacttagaaaagtggagaaaatgttaggaacaatgaaagaaagataaaatgtatccagtatatttctaatgagtaagtatggaaaattactgtactctgagacggtttaggccaagtctgtgttatggctatctttatatagatagtgcatgtttgaagattggggaaagcttatgtcaataaatgtttatgtacttaatctacatgatttgcctaaaaatcctcaaagttgggatgaaggcattcctaagagtacatttttagacgtcattaaatatacagacgtatccacgtagtttttgttctttcagttaggcacacaattataattattgcactggttaacttgaagcagcagaggctgtagtttcctagtgctgactctgggcgccgctgttggccaaagtggagagcttggcgctccagatctcctcgcgcagccgcagcgcgctttccagggcagccccagctcagactccccagcgccagcctttacaccgcttcctcctcggaaaaagaagaattttttcttgaactggaactgcaactaaagtccgttcggagatccaaaaatctgcaatacagaggttatttgtaacccggcgtctccaggctggtgagcaagctgaggagagcaagagggatggggagcggcgccggggagctgggccgggctgagaggctgccagtgctctttctcttcctgctgtctttgttctgcccggcgctctgtgagcagatccgctacaggattcccgaggaaatgcccaagggctccgtagtggggaacctcgccacggacctggggttcagcgtccaggagttaccgactcgaaaactgcgcgtcagttcggagaagccttacttcaccgtgagcgcagagagcggggagttgcttgtgagcagcaggctagacagggaggagatatgcgggaagaagccagcttgtgctctggaatttgaggctgttgctgaaaatccactgaacttttatcacgtgaatgtggagatcgaggacattaatgaccacacgccaaaattcacgcaaaattcctttgagctgcaaataagtgagtctgcacagcctggcacacgatttatattaggatctgcccatgatgcggatattggtagcaacacactgcagaattaccaactcagtcccagtgatcatttctcactgataaataaagagaaatcagatggcagtaaataccctgagatggtattgaagacacctttggacagagaaaagcagaaatcctaccacttgactttgactgccttggactttggagctccacccctaagcagcactgcacagatacacgttctagtgactgatgccaatgataatgctccagtgttcagtcaagacgtatacagggtgagcctttcagaaaacgtgtacccggggaccacggtgctacaggtgactgccacggaccaggatgagggtgtcaatgccgagattactttctctttcagtgaagctagccagatcacccaatttgacctgaactctaacaccggggaaattactgttttaaatacattagattttgaagaagtcaaagaatattccatagttttggaagcaagggacggtggaggaatgattgcgcaatgcacagtggaggtagaagtcatagatgaaaatgacaacgccccagaagtgatattccagtctctacccaacctaattatggaggacgccgagctgggaacacatattgctttgctcaaagtccgtgacaaggattccagacacaatggagaagtgacttgtaaattggaaggtgatgttccatttaaaatattaacttcttcaagaaacacgtataaattagtgacagatgctgttctagaccgcgagcagaatccagagtacaatataaccgttacggcaacagatcggggcaagcctcccctctcctccagttccagcatcaccctgcacattggtgatgtaaatgacaacgctccggttttctcacagtcttcctatatagtccacgtggccgagaacaacccgcctggagcctctatttcacaagtcagggcttctgatccggacttggggcccaacggccaagtctcttactgcatcatggccagtgacctggagcagcgggagctgtcatcctacgtgtccataagcgcggagagcggggtggtgttcgcgcagcgcgccttcgaccacgagcagctgcgcgccttcgaactcacactgcaggcccgcgaccagggctcgccagcgctcagcgcgaacgtgagcctgcgcgtgttagtggacgaccgcaacgacaatgcgccacgggtgctgtaccccgcgctgggtcccgacggctctgcgctcttcgatatggtgccgcacgctgcagagcctggctacttggtgaccaaggtagtggcggtggacgcagactcaggacacaacgcctggctgtcctaccacgtgctgcaggctagcgagcccgggctcttcagcctggggctgcgcacgggcgaagtgcgcacagcgcgtgccttaggcgacagggacgccgtccgccagcgccttctggtcgccgtgcgtgacggtggacagccaccactctcggccactgccacgttgcacctggtcttcgccgacagcttgcaggaggtgctgccggatatcactgaccgccccgacccctctgacctccaggctgagctgcagttttacctagtggtggccttggccttgatctcagtgctcttcctcgtggccatgattctggccattgccttgcgcctgcgacgctcctccagccccgcctcctggagctgcttccagcctggtctctgtgttaaatccgaatccgtggttccccccaactacagcgaggggactttgccttattcctacaatctatgtgttgcacatacaggaaagacggagtttaatttcctaaaatgtagtgagcagttgagttcaggacaagacatactttgcggtgattcatctggggccttatttccactttgtaattccagtgaattgacttcccatcaggtgagtttcctttaagtataatttaatgctcattgcctacccatttctccatattcacaagaaaatatacatatttgcaggaaaatatataatttttagatgtcatggatcattttaggaaagttgtagtcagttaaaaagctgtcatatcattctacaaaggaggagtaaagtaggagcaattgtgtggcccaacatttgtttgttttttagccaagcttagatttataaagcaatgagggtgtggttttaaccacaaagtgaaagtgttagacagttgttggctctctcctaaaaagtgaatgagatttttcctatacattttccttcttgttgactaatatatgatgaatacttttttcagcttggatataccataaatataaaaataataaagccaaagaatttaagctaaaattcaacacttttcttaactaatttaactggtatggtctccatagtagtccactgttttgtttcctgtgttaacttcccttttgtttcaaaagctcttagaataaggagtcaactggatttttatgtccatggaccccttgtgattatatgcagtgtacgctgtgtgtgcgtgtgtgtgtgtgtgtgtgtgagagagatccttttacttagaaaaaggtctactatgctcattagaagatcaaaagcagattctccttacttgtaacataggagtttcaggattaatctgtattcaagctcattctatatccttcatcaaagaaaagacaatgttttgtgtctgttgtccctctcacacacagccctaatatataatgtgtaactgccttatctgcagccctaaactaatatagctagaggtcttctaatcattctcctacctctaggaaagaaatatagtcttgaaaactgccaatctggtgtgcatacaaaatatatacaaaataccaaggaacattatatgagccttttgctaggtatatctaagcaactgcttcagttaatggccactttacaaattgctgaaagaaggaaacgtctttcgattcttttttttttctttttttttttttgagacagagtctctgtctgttactcaggctgtagtgcagtggcacaatgatagctccctccagcctcaaactcctgggctcaagcattccttctgcatcagcctcctgactagctggaactcaggctcatgccaccagacctggctaatttttctgttttcagtagagaaaatattttctttcactaatttaactggtatggtttccattgtctacccagttttccatatgcataagaaaatatattcacaggaaaatataaagttttcagatttcatgagtggttttaagaaagttttagtcagtgaaaaaactatcataccagtcttcaaaggaagggtgaaataagttcatctgctacgttgcccaggctggtcttgaagggaaacagacttttttgtagtcatacttatcctttggcttcttagtaagtattatatagtcattactttttgcagttttttagatcaaagtgttaatgtaggtaaagttaattttagaatatatgtaaaagtcaagtctgctttaaatttaatcatctctttggtgaaagggatgggatggagctttgctttttatcatatattcatctgtacctttcaagtattcaaatagaaaaatataaacaatgtaaataaaatagcaaaacaatgtaatatctcataaaactgcaatggtaaaagcatttatcctattgaaattccacaatttttatttgaaaatattatcgacatgtaattcaagtggcatttagaagaataatttaaaagcaacaactctatagaaagcttgtaaaatgattaagtagtttaaaccaaataaaacaatttctgagtcagtcatctccagtaggtctattttagtctcaagataaattcatttctggtgacaactgaagttcttagttatttgttagtatatattggagacatttacaataaagcttagagcacaatgggaaatgaaagtatcatgttttttttaagaccaaatgtattgcagaaatgtgagtaatttaatccgatgctacaatctgatcattctgatctaatctgatcatttaataacactaaataaaaccttcatctcacattctttggctgtttcttttaaaatatgggtttacggataaatcaaataaattcaaaacaaagtaataagcaaatgatttttttttctcagtaatctagtagagtattacatttagaagtaatctgtatctcagtgcagtaactatttaggactgtaagcgccgctgttcacctactggaagacaaatgcaaccgaaaacactcagatctcacacctcacgaagacccgcagatgccacaaactaactgctggactgcagcgaaacccgacccctgtttggaggcactccaggtttccggaggattgtcatctccatagctgcggcaagaaactaaataagacccatttatgcacagtgaagattctgagaggattctgcagcaaaacaacaatggccgctccacagagtcgccccagacgcggcgagctgatcctgctgtgcgcgctgctgggaacgctgtgggaaatcgggaggggacagattcgctactctgtgccagaagagacggacaaaggctccttcgtgggtaatatctccaaggacctggggctggacccccggaagctggcgaagcacggagtccgtatcgtctccagaggtaggacgcagctctttgctctgaacccgcgcagcggcagcttgatcaccgcgggcaggatagatcgggaggagctctgcgctcagagcccgcggtgtctgataaatattaacaccctggttgaggataaaggaaaactctttggggtagaaatagaaataattgatattaacgataataacccaaaattccaggtcgaagatctagaagtaaaaattaacgaaatcgcggttcctggagcacgttatccactcccagaagctgttgacccggatgtgggcgtgaactccctccagagctaccagctcagccccaatcaccacttctccctggacgtgcagactggagacaatggagccataaacccagagctggtgctggagcgcgccctggacagggaggaagaggctgctcaccacctggtcctcacggcctcggatggcggcaagccgcctcgctctagcacagtgcgcatccacgtgacagtgttggatacaaatgacaatgccccggtttttcctcacccgatttaccgagtgaaagtccttgagaacatgcccccaggcacgcggctgcttactgtaacagccagcgacccggatgagggaatcaacggaaaagtggcatacaaattccggaaaattaatgaaaaacaaactccgttattccagcttaatgaaaatactggggaaatatcaatagcaaaaagtctagattatgaagaatgttcattttatgaaatggaaatacaagccgaagatgtgggggcacttctggggaggaccaaattgctcatttcggtggaagatgtaaatgacaatagaccagaagtgatcattacgtctttgtttagcccagtgttagaaaattctcttcccgggacagtaattgccttcttgagtgtgcatgaccaagactctggaaagaatggtcaagttgtctgttacacacgtgataatttaccttttaaattagaaaagtcaataggtaattattatagattagtgacaaggaaatatttggaccgagaaaatgtctctatctacaatatcacagtgatggcctcagatctaggaacaccacctctgtccactgaaactcaaatcgctctgcacgtggcagacattaacgacaaccctcctactttccctcatgcctcctactcagcgtatatcctagagaacaacctgagaggagcctccatcttttccttgactgcacacgaccccgacagccaggagaatgcccaggtcacttactctgtgaccgaggacacgctgcagggggcgcccctgtcctcgtatatctccatcaactctgacaccggtgtcctgtatgcgctgcaatctttcgactatgagcagatccgagacctgcagctactggtaacagccagcgacagcggggacccgcccctcagcagcaacatgtcactgagcctgttcgtgctggaccagaatgacaacgcgcccgagatcctgtaccccgccctccccacagacggttccactggcgtggagctggcgccccgctccgcagagcgtggctacctggtgaccaaggtggtggcggtggacagagactcgggccagaacgcctggctgtcctaccgcctgctcaaggccagcgagccgggactcttctcggtgggtctgcacacgggcgaggtgcgcacggcgcgagccctgctggacagagatgcgctcaagcagagcctcgtggtggccgtccaggaccatggccagccccctctctccgccactgtcacgctcaccgtagccgtggctgacagcatccccgaagtcctgaccgagttgggcagtctgaagccttcggtcgacccgaacgattcgagccttacactctatctcgtggtggcagtggctgccatctcctgtgtcttcctcgcctttgtcgctgtgcttctggggctcaggctgaggcgctggcacaagtcacgcctgctccaggattccggtggcagattggtaggcgtgcctgcctcacattttgtgggtgttgaggaggtacaggctttcctgcagacctattcccaggaagtctccctcaccgccgactcgcggaagagtcacctgatctttccccagcccaactacgcagacatgctcatcagtcaggagggctgtgagaaaaatgattctttgttaacatccgtagattttcatgaatataagaatgaagctgatcatggtcaggtgagtttagttctttgcttgcttttaatttccagatgaattttatttggcataaattatgttttgaaaaacattgtgaagatagttgaaaataatttttaaggtgtatcacagagttttgggtttattttggtggtgttactataaaattgaactctaatagtcataggttattgtttcatttgcttttaaacgacttggaaaagattgttcaaccattttaagccttccagtattttattcctattatcactcattcacttaagaagtagctacccgtccatactggtaattttgctattgtttgtgtgtgtgtgtgtgtgtgtgtgtgtgtgtgtgtgtgtgtgtgtgtgtatcccaaactagaacttcagaaaattatcaagaagtctaaagccttgttattagcttagcaaaagtaaaatatatctcagaatttttagggttatgtttagcatttgaacctgtaactaggctcttgtagatttcttcactttaaacctcttttctgagccctgtttctgtaccagtgcccttcaaaactttaatacttcttaccatccttcaaaacatgaacaaactttaaagatggatcttggtgggagatgagactggttactaaatattaagtatgtgagtcagtggtcacctgggctccatgcccatggagacatgaaatctaaagcctagaatgtccattgctcccccaaacaaaaaacaaaagcaaaaacattagatctgaattaaaatgtaattttaaactgttgaaagtgacttttgtaaaatatgtaagaacatatttcaatacaattccaattagctgtttcggttgtgcattgatgtgaagtggtgagaatgttgatattaagaaccaatgtttcaggtacacaagttctaaataagctgatcaattcaattaaagttattcagtcttggctggacacagtgcctcatgtctgaaatcccagcactttgggaggctggggcaggaggaccgcttgagccccgggggtttgaaactgcagtgagctatgatcatgccactgcactccagcctaggtggcagaactagaccctgtctctaaaaaaactattattaggccgggtgcggtggctcacgcctgtaatcccagcactttgggagactgaggtgggtggatcacctgaggtcaggagttcaagatcagcctggcaaacatggtgaaaccccgtctctactaaaaactacaaaaattagccaggcatggtggcatgcgcctgtggtcccagctactcgggaggctgaggcagaagaatcacttgaacccgggaggtggaggttgcagtgagcctcgatcctgtcactgcactccagcctgggcaacagggtgagactccgtctcaaaaaaaaaaaaaactaatattaatagtaaaaactcggtataggctatccattattgtattcctgcataccttcttgtagcatttgaataaagctaatacctgaattgattgttgtaaggtagaagtagatgacccaataaatgtttgttattaatgaaaaggacatttcctaaggattgtgtagtgttctactgtatggtgcatattcagtggagtgggagttaacttcatagtttgtgtaccatttggatgcacatttgagaggacaacatattattggcactttgcaattttaaaaactcggatgaaagttgccctggtaggaaagaaaatccttactctccctaaaaatgttggctagttgtttttattaatctgacaaatggactaaagaaggttgaccaatgtccacaaatttatgtaaatgaacttatgagcttcatttatccaattccaaagtcatttcagataggataataatgcaatccactagaatatccctttgtaccttgtattgcagaatagataagcatttccccaataactcttaagaatgaatttatgtactgtaaaagatatgacataagagaagtattttgagatatgaagaagagcaacgtagtagggtatatcatttcttagctacatcatatgggcagtatacttgaatgaatatttcctgaagtagaagagtaaagaaaaattatttttataaagaatgttaatatagtcaggaagaggagatgtttggggattggtataaaattgccacaactttacaaaatagttttaaatagtatagatttccctaatatgtgtaatataaaacactagaaatattggggagttggaaatcatagaaatgaacagaagaatgataaaattgtttccatagctaataaaaaatgaatttttgaaatcagtatagtatgaaggctctgagagcaagaactgtatcatattaattattatattgccagtgacaagggcaatacttagttctagctaagagttcaaggtatgtttgcagaatggtgaaagaatggaccaatgtatgcaggtttgtataaaaacccaacgtgatatttctaacaatttggaaaacagagaaagataccttaaagaagttgttataattttttattaagtatatggacgtaaaaacttggcttgttaagttaggcacacaaaaacaattactgcactggttaacttgaagccgcagaggctgtagtttcctagtgctgactctgggcgccgctgttggccaaagtgcagagcttggcgctccagatctcctcgcgcagccgcagcgcgctttccagggcagccccagctcagactccccagcgccggcctttacaccgcttcctcctcggaaaaagaatcgtttcctaaactggaactggaactaaagcccgttcggagatccaaaaatctacaatacagaggttatttgtaacctggcgtctccaggctggtgagcaagctgaggagagcaagagggatggggagcggcgccggggagctgggccgggctgagaggctgccagtgctctttctcttcctgctgtctttgttctgcccggcgctctgtgagcagatccgctacaggattcccgaggaaatgcccaagggctccgtagtggggaacctcgccacggacctggggttcagcgtccaggagttaccgactcgaaaactgcgcgtcagttcggagaagccttacttcaccgtgagcgcagagagcggggagttgcttgtgagcagcaggctagacagggaggagatatgcgggaagaagccagcttgtgctctggaatttgaggctgttgctgaaaatccactgaacttttatcacgtgaatgtggagatcgaggacattaatgaccacacgccaaaattcacgcaaaattcctttgagctgcaaataagtgagtctgcacagcctggcacaagatttatactagaagtagcagaagatgcagatattggcttaaactctctgcagaagtataaactctctcttaacccaagtttctcattaataattaaggagaaacaggatggtagtaaatacccggaactggcactggagaaaaccttagaccgggaacaacagagttaccatcgtttagtcctgactgccttggacggtggacatccacccctaagcggcaccactgagctccggatccaggtaaccgacgccaatgataatcccccggtattcaaccgagacgtgtacagagtcagccttcgggaaaacgtgccaccaggcaccactgtgttgcaagtgtcagccactgaccaagacgagggcatcaactcagaaattacttattccttctacagaaccgggcaaatctttagtctgaattcaaagagcggagaaattaccactcaaaagaaactggattttgaagagaccaaggaatattcaatggttgtagaagggagggatggtggtggactggttgcacaatgtacagttgaaattaatattcaagatgaaaatgacaatagcccagaagttacattccattctctacttgaaatgattctggaaaacgcggtgcctggaacactaattgctttgatcaaaatacatgaccaagattctggggaaaatggggaggttaattgtcaattacaaggcgaagtcccttttaagattatctcttcatccaaaaattcgtataagttggtaacagatggaaccctagaccgagagcaaaccccggagtacaatgtcaccatcacagccacagacaggggcaagccgcccctctcctccagcataagcgtcatcctacatatcagagacgtcaacgataacgctccggttttccaccaggcgtcctacttagtcagtgtacccgaaaacaaccctcctggggcctccatcgcgcaagtctgcgcctcggacctggacttggggttgaacggccaagtctcctactctatcatggccagcgacctagagcctctggcactggcctcttacgtgtccatgagcgcgcaaagtggggtggtgttcgcgcagcgcgcctttgactacgagcagctgcgcaccttcgaactcacactacaggcccgcgaccagggctcgcctgcgctcagcgcaaacgtgagcctgcgcgtgttggtgggcgaccgaaacgacaacgcaccgcgggtgctgtaccccgcgctgggtcccgacggctctgcgctcttcgatatggtgccgcgcgctgcagagcccggctacctggtgaccaaggtagtggccgtggacgcagactcaggacacaacgcctggctgtcctaccacgtgctgcaggctagcgagcccgggctcttcagcctggggctgcgcacaggagaggtgcgcacagcgcgtgccttgggcgacagggacgcggcccgccagcgcctgctggttgctgtgcgtgatggtggacagccgccactctccgccaccgccacgctgcacttggtctttgctgacagcttgcaggaggtgctgccggatatcactgaccgccctgtaccctctgacccccaggctgagctgcagttttacctagtggtggccttggccttgatctcagtgctcttcctcctggccgtgattctggccgttgccttgcgcctgcgacgctcctccagccctgccgcctggagctgcttccaacctggtctctgtgtcaagtctggacctgtggttccccccaactacagtcaggggactttgccttattcctacaacctatgtgttgcacatacaggaaagacggagtttaatttcctaaaatgtagtgagcaattgagttcaggacaagacatactttgtggtgattcatctggggccttatttccactttgtaattccagcgagtcgacttcccatcctgagttggtgagtttcatttatgtctattctttttcattacccacccaattttctgtatttacatgaaactatcgtacattttcaagtccaatgagttgtcttagggaagtcagagctgctcagaaagctgtcctaccattctttaagaggagcagtaaattgtgagtttttatgtcgcataaaagaagtagccttatagatttacaaagtagtgagagtttgctcttagcttcctctctagcaaaaacatttggtgcgtttttttgtcctctttctcaaagctaatgaattttacctattcgttgtctcattctttaacatgtttatattttattgtatgtagataaaccattaaatttaatgtatgtaatcatttaattcatcttttaaagcaaagaaactgctagtagatgtctttcttcactgatttcactggtagttttcatctctttcttatgttcctcatatatgctttcttattcctacctaatggatttatgattttttgaatctcctaaaattttattaaaaatactatatgttggctgggtgcagtggctcatgcctgtaatcccagcactttgggaggccgaggcggttggatcacatggtcaggagttcaagaccagcctgggcaatatggtgaaaacccgtctctactaaaaatacaaaaattagctgggtgtggtggcgggcgcctgtaatcccagctactcaggaggctaagacaggagaattgcttgaacctggcaggtggaggttgcggtgagccgagatcactccattgcattccagcctgggcaacaagagcaaaactccatctcaaaaaaaaggaaggagaaggagaggaagaagaagaaaaatactacatgttatgtgtatgagagagaaagagagagactgattcactgaacttagaaggtccaaatcatccaaataattttctaagtttatccaggttttcttggatgcaaaatccttttccacctctatataattaccagaagaaacttacaaaaaaaaggaaatgctattgcctgaatttctcttgctcggaatcctgacatattcttgaagaaggggaaaaagacaccggatttgtcttatcgtttggagctttaaatataaatgactggatgttttctcaacatccttgtaggatggaaggtgaatacaggattattccatttttaagacaaaaactactagtcttgtgtacatacaaagctcccattacatggtataagtcttttgcttggtttcccttagtatgtgattcagtaaatgggttccttacaaagtgctgagatttcttataataccacttacttttaacctttcagtagttttctttgttgtatattttgtgttctttttcccaaattattatataagtttaagtgatgcttagaataatgtttaagaccactttaaaattgcataatttattgatgaaggattaaaatagaaacttgcttttcagtgtatatgcatttgaatcattgaaacacagtctgtgcatgcattacatattcacattaaaaaactaagcatttttgaaatagcagaaaagtttaagcaattacaaaaatgtgaaaatttccaactttaatcctgttaatatttagcaatattaggcgagaacatctgtaactattgctgaattaatattacttttataatacaaaaatttaaaataaacgtttttccaggaattttatcatcaaaataaaccccagaaaataatttcaaagtggataatctatccttatatatgtattaatacaattatatattttacatttacaaatatataggtataaaaattaaaaatgaatgtacttccaaacaagattgcacataaaaattacttcagaaaattgttaagatacacagaaaaaattgaagcatcataaaaaggaaattataatagtttacatatctagaaatagagtgcaaagttctaccaagaataagaataaattaatattaagcaatggtttgtgattttataatacacttacagaaattttattccactttatttacaactcagatatctaaaaaatagattgcttttgaaatacaaatgcaagaaacaattggagaaatctaaaatcataattagaagagagtagtgttttctttatcagccatctgatataatgttacacatcagtgggtgtagtaacggcttaggactctgagcgccgctgttgatcaactctaagcgaaaatcaggactccatccggatttccagttctgcggctacacaaaacccggcagataccacaaacctgctcccaggctgcagcaaaactcagcctctttcttctaaggaaaagatcaccatactttgcagggtggaagaaagaacctgatgaagcagcgcgcacagagatccttttgagaaaattccaaagcgaggcagcaatggcagctccaaccaaatgccagctccgcggaagattagtcctgctatgctcgctcctggggatgctatgggaggccagggccagtcagattcgctactcagtgcctgaagagacagaaaagggctatattgtgggcaacatctccaaggacctggctctggagccccgggagctggcggagcgccgagtccgcatcgtctctagaggtaggacgcagcttttctctctgaacccgcgcagcggcaccttggtcaccgcgggtaggatagaccgggaggagctctgtgctcagagcccgcggtgtctggtgaactttaaagtcctggttgaagacagagtgaaactgtacggaatagaaatagaagtaactgatattaacgacagcgccccaaagttccaggccgaaagtctggaagtaaaaattaacgaaatcgcggttcctggagcacgttatccacttccagaagctattgatccggatgttggcgtgaactccctccagagctaccagctcagccccaatcaccacttctccctgaacgtgcagactggagacaatggagccataaacccagagctggtgctggagcgcgccctggacagggaggaggcaactgcccaccacctggtcctcacggcctcggatggcggcgagccgcgtcgctccagcacagtgcgcatccatgtgacagtgttggatacaaatgataatgccccggtttttgctcaacggatttaccgagttaaagtccttgagaacgtgcccccaggcacctggctgcttactgcaacagccagcgacctggatgagggaatcaacggaaaagtggcatacaaattctggaaaattaatgaaaaacaatctctgctattccagcttaatgaaaatactggggaaatatcaacagcaaaaagtctagattatgaagaatgttcattttatgaaatggaaatacaagctgaagatggtgggggattgaaagggtggacaaaagtgctcatttcggtggaagatgtaaatgacaatagacctgaagtgaccattacatctctgtttagcccagtgagagaagacgcacctcagggaacagtaattcttcttttcaatgctcatgaccgagactccgggaagaatggtcaagttgtctgttctatccaggagaatctatcttttacattagaaaattcagaagaagattattacagattgttgacggcccaaattcttgaccgagaaaaagcctcagaatataatatcacggtgactgcaacagacagaggaactccgcccctgtccacagaaattcacatcaccctgcaagtgactgacatcaatgataatccacctgctttctctcaagcctcctactcagtctacctcccggaaaacaacgccagaggtacttccatcttctccgtgattgcctatgaccctgatagcaatgagaattctagagttatttactccttggcagaggataccatccaagggtctcctctctccacctatgtctctattaactcagacactggtgtgctgtatgctctgtgctcctttgactatgagcagtttagagatttgcaaatgcaggtgacggcaagtgacagtggaagcccaccacttagcagcaatgtgtcattgagactgtttgttttggaccagaatgacaatgccccagaaatcctgtaccctgccctccccactgatggttctactggtgtggagctggcaccccgctctgcagagcctggctacctggtgaccaaggtggtggcagtggacagagactcaggccagaatgcttggctctcctaccgcctattcaaggccagtgagccagggctcttctcggtggggctgcacacaggtgaagtgcgcacagctcgggccctgctagatagagatgcgctcaaacagagccttgtggtggctgtacaggaccatggccagccccctctctcggccactgtcacgctcacagtagccatagctgacagcatcccagacatcctggctgacctgggcagtcttcagatccctgcagacctggaggcctcagaccttaccctctacctcgttgtggctgtggcagtcgtctcctgtgtcttcctcaccttcgttatcacgctgctggccctcaggctgaggcactggcactcctcgcatctgctgcgggctaccagtgatgggttggctggtgtgcccacctcacactttgtgggtgtagatggggttcgagctttcctacagacctattctcaggagttctccctcaccgctgactcaaggaagagtcacctgatcttcccccagcccaactatgcagacacactcatcagccagcagagctgtgagaaaaatgagcctttgtgcgtctctgttgattccaagtttcctatagaagacacccctttggttccggtgagttcattttttttctttctttcttttctttttttgttttttgttttgttttgtttttgagacagagtcttactctgttacccaggctggaatgcagtggtgtgatctcggctcattgcaacctccgcctcccaaattcaagcgattctcctgcctcagcctcccaagtagagtagctgggactagagtagagtagctgggactacaggcctcccaagtagaataactgggactacaggcacgtgccaccacgcccggctaattttttgtgtgtttttagtagagacggggtgtcaccatgttggccaggctggtcttgaattcctaacctcaagtgatccacccacctcagcctcccaaagcactgggattacaggcgtgagccactgcgcctggcccttaactttctattatagttagctttctctttaactgtctgtacttaaggtagtataagttgatatcagtgtgtttctcatcacttttcactgggcctaattgttgctccaacactgaaaggaggcatttattagttatatttgctgatataactttcatgttctcataataattaacctgctgtcaacgtaaaccatacttcatggggtagctctcagcctgcattgatgtgggctttttgggtagggttgcttcattggttgcagtggactcatatcataaaattcttactcctttttttttttttttaagagatgggggtgtcattctgttgtccagggtggaatgcagtggtgtgggtaaagcttactgcagtctcaatctcctgggcttatgcaatcctcccacctcagccttcacagtagctaggactgaggtgggagggctagcaagctatgttgcccagactggtctcaaacgatcttcctgcttcagtttcccaaagcactgggtgaggtgtgaaccacctcacccagcaaattcttactcctacgatcatttattcaggtcatactatgtttgtaagggtaaactgataaaaaggtaaatgtattcttcttagagaaacagctgaaagcccagatttattgcttctattcttccatttctatgacaggaaaacacctctttgaggttatatttttcagatcacaagtgtgtaaagtctgtttgtgtttacagatattttctgacgaagattcaaacttcagttatccacttccaaaccctagtaaaccaattttttccctttaatggtgaaagttgtcacatcttttattctcatatcttcaaaggtcttaatttcctaatgctttaatgttaaattatggagaatagtaggacattcttcttttctatagtatatgcttgctcaagagaagtttctaagactggacactgtgaaatgacaaaacaaggaattaaaaatatttctctcacttatatattatttctggctcaattctccaacttttgagtctagaaatgaacttgcatatcagatataatttaagaaaatattctcaggaactgctgggaagattctaaaactattttactgtttttagctataaggaagagaataatgtattatttaatgttattttaaacatagtgttgtttcaaatagtaaataacatttcacaagacatttgaaaataagctttgaagttgactcaaaattctatgctaaacatgtgatccatagatacactgatgactgctggcatttctgtggaaatgaagaattgttttatttgtttgtaattatttgggtttcagttgctttatttttaagaaaaaaaagctgaagtgtctgggaatcctttatgacatacagacattttaattatttcaaacacgttttcccccttaagtgggtagcaaaaaaaataaagcatacttcaggctcatatttttaaccatgcaacaagaaaattgttacaatttctgttctgaggagtagccttcatacttagtatttataaatattgaaatgtatgttaatttggggaaaacataacagatatccatgaaggcttgtatgtcatggtaggtagttactattcgataccacaaaaatgtctcttgcccttaaaaccagaacacgaggctcaccagacagatgactgaatggagtatggaaaatctttatttctgtttttcttaggctatgtaggacttaacttattgtgcattggtaacagattgtagaacataagctgaaagataaaattcttgaccttaatgtctcatcttaaaaagaagcattggttgacattctatatctcgtattacttaaaaataatgggggagcgcagtatatattaaacaaagattggctttgtggtgatcattgttgaaggtggggtgatggctatgtgaaggttcactatatatactccctactgttgtataagtttgaaattgtgcataatagatttatttaaaacacaaagcatagaaatatctactataatattatggtgagagcaaaatttgagggggatgtacacctgcattttcgaagaatatatacatttcggagaccgaattcaaaatgaaaaaccgggctgctgtcccgcacggagcctctgggcgccgctgtcggccagtgcagagcaagcgctgacgccggggatccgtcagcctctggcctgggattccctgcgcagccaacaacagaaagaagaaaaccagctcccacacagagcctcccggctgcgcagacctttcccagcacagcggattgccagctccgagacccgggactcctcctgtcctgggccgaatgctcttttagcgcggtagagtgcactttctccaactggaaaagcggggacccagcgagaacccgagcgaacgatgggagggagctgcgcgcagaggcgccgggccggcccgcggcaggtgctatttcctttgctgctgcctttgttctaccccaccctgagtgagccgatccgctactcgattccggaggagctggccaagggctcggtggtggggaacctcgctaaggatctagggctcagtgtcctggatgtgtcggctcgcaagctgcgagtgagcgcggagaagctgcacttcagcgtagacgcggagagcggggacttacttgtgaagaaccgaatagaccgtgagcaaatatgcaaagagagaagaagatgtgagttgcaattggaagctgtggtggaaaatcctttaaatatttttcatgtcattgtggtgattgaggatgttaatgaccacgcccctcaatttgataaaaaggaaatacatttagaaattttcgaatctgcatccgctggtacacgactatcgcttgaccctgccacggatcctgatataaacataaactcaattaaagattataagataaactctaatccttatttttcattaatggttagagttaattccgatggtggcaaatacccagagttatctctggagaaactcctagaccgggaagaacagagatctcatagcttgatattgactgccttggacggaggggacccaccaagaagtgccaccgctcacatagaaatttctgtcaaggataccaatgataaccccccggttttcagcagagacgaatatagaattagtcttagtgaaaatctgccccctgggtcccctgtgttgcaagtgacagccactgaccaggatgagggggtcaatgctgagataaactactacttccgaagcactgcccagagcacaaaacatatgttctcattggatgagaaaacaggtatgattaagaataaccagtcatttgattttgaagatgtagaaaggtacaccatggaagtggaagcgaaggacggaggtggtctctctacccagtgtaaagtaatcatagaaatccttgatgaaaacgacaacagcccagaaataatcatcacttctctctctgatcagattttggagaattcacctccaggaatggttgttgccctcttcaaaacacgggatctggatttcggaggaaatggagaagtcaggtgtaatatagaaacagacattccattcaagatttattcttcttccaataactactacaaactggtgacagatggagccctggaccgagagcagacaccagaatacaatgtcaccatcgtagccactgacaggggcaagccgcctctttcttccagtagaagcatcaccttgtatgtcgctgacatcaacgacaacgccccagttttcgaccagacgtcctacgtggtccacgtggccgagaacaacccgccaggagcctccattgcgcaagtgagcgcctctgacccggatttggggctcaatggccacatctcctactctatagtggcgagtgacctagagcccctggcggtgtcgtcatacgtgtcagtgagcgcgcagagcggggtggtgttcgcgcagcgcgcctttgatcacgagcagctgcgcgccttcgcgctcacgctgcaggcccgcgaccacggctcgcccacgctcagcgccaacgtgagcctgcgcgtgttggtgggagaccgcaatgacaacgcaccgcgggtgctgtacccagctctgggtcctgacggctccgcgttcttcgatatggtacctcgctctgcagagcccggctacctagtgactaaggtggtagcggtggacgccgactcgggacacaacgcctggctgtcctaccacgtgctgcaggccagtgagcccggactcttcagcctggggctgcgcactggggaggtgcgcacggctcgagccttaggcgacagggacgcagcccgccagcgcctgctggtcgctgtgcgtgacggtggacagccgccactctctgccaccgccacgcttcatctggtcttcgcagacaacttgcaagagatactgccagacctcagcgaccgccctgtactctctgacccccaggctgaactgcagttttacctggtggtggccttggccttaatctcagtgctcttcctcctcgccgtgattctggccattgccttgcgcctgcgacgctctctcagccctgctacttgggactgcttccatcctggtctctgtgtcaagtctggacctgtagttccccccaactacagtgaggggactttgccttattcttataatctgtgcattgcacatacgggtacaaaagagtttaatttcctaaaatgcagtgtgcccctacattccaatgaagacatggtttgcagtgtttctcctggagccttaattccacctcatggtggggaggatttgacttcacatcctgagactctgacttcggtgagtttctcttttttgtgtgtgatttatctaatagtctactagtttctcatattttaggcatactactttattttcatatctagaatcatatgtttaaaatccatagctttttacaatattttctcaatgttttttcaattatagttttcactatgtatttggttcataagttgctctatctttttgtaaaataatgtcaccagactgaagatattttgtctttgtcttttttttttttttttttttttgagatggagtctcgcactgttgcctaggctggagtgcagtggcgtgatctctgctcactgcaacctccgccttctgggttcaagcgattctcctgcctcagcctcccaagtagctgggattactggtgcccctcaccacagctaaattttttgtatttttagtagacatggggtttcactatgtcgaccaggctgttcagaaactcctgtcctcgtgatcctcccaccttggcctctcaaagtgctgggattacaggcgtgagccacaatattttgtcaagttctgactatcgaacagaagcagtggtcttggcatctaagaaaacaaacaagtaacctatctattcaaatttgcgaagacttagtgaatttacgatatcttatttatatatttttaaagcctaaaaatattcagaagacaggcccagtggctcacacctataatcacagcactttgataggctgaatcggaaagtatcacttgagcccaagaattgagaccagcctgggcaatatagggagaccccccatctctactaaaacaacaacaacaaaaaaaaacattagcagagtgtggtagcattcccctgtggtcccagctacttgggaggctgagctgggtggattgcttggtcctgggaggtcaaggttgcagtgagccctgatcttgccactgcactccagcctgggcgacagagtgcgaccctgtctctaaaataaataaataaatatgcaggcagggccaagtgtgctgtaatcccagcactttgggaggtggaggtggagaatctcttgagcgcaggaatttgagaccagcctgggcaacacagggagactccatcgctacagaacatttaaaaattagcagggtgtggtggcacatgcctgtggtctcagctactctggtggctgtggtgggagaatcgcttgagcccaggaagtctaggctgcagtgagctgtctaggtgacagagtgagaccctgtctcaaaaaaaaaagacatttctaagaaataaatgaaatactattgcctttgcactcagtctctgtctctgattctctgatagaagatttttgaagaaaaaagataaaatctttgaagagttctatacttggaaggcatagtgacataaacacttctgaacatcctgttctctgtgtgaaagaagtgaacttctataccctttgcatttgagggaacaattgctactgggttgatgggcacacacagttgaagatatgtgaaccactggactttggcctctgatacaaactgcctaagagaagagattatttatactggtattaatgctctgatgaaaacaggtcatttgacataaacacttacttgttaaaaacctatatcactacatctaactttgttttctaaaacttttagtacttcaaattctacgtatttcttttctcattacaatgcaaacagtttaatttgcaactgtaatatatgttcattttagtttgtgattacctgcttaatcatttaaataggtccatttaacttgtatccctgtaagataaagtatgttttacacaaaaaggttaattaaggctcagtaaaactattctagaagagtactttaaaaacctcttacacaatcctaagctaaataagtttaatgaattaagtagttacaattataaagcttcagagtgaattatctcatgagtttatttaatataatctttgtatgaatgtatactaaataaaattggcctattcaaatcacaattttaaattataagacttttctgaatttacctagacactaatatgacctaaaataagtattatttaccttttattaaagtgtgtacatttctgttgggaaaacgtgttgcaaatatatatttaaccaaacattatcttgaaatatttacaatattttcactccactttatcacacctcccctaagaaacctacatatagtaaattatttaaagataggagtggagaaaccaaagaatctatgtaaaatataataatccaacagaatagtttactttccattgcatgtatcacttgggtgcagtaacttcttaggactctgagcgccgctgttcacctactaggagagaaaacgcagccagagctcaatccggattctcagggcttcaactacacaagccccacaaaccggctgctgggctgcagggaagctcactccagaatttaaagtgcccaggctacagagacaccctgaagccacagaaagacaaaggaaccggttgaaacacacaacgtgtccagtgaggactttgcagaattctgtaaccagactacaatggccgctcaaaggaatcgctcaaaggaatcaaaggattgcagcgggctggtcctgctctgccttttcttcgggattccatgggaggctggagcccggcagatctcctactcaattcctgaggaattagagaaaggctctttcgtgggcaacatctccaaggacttgggtctggcgccccgggagctggcggagcgcggagtccgcatagtctccagaggtaggacgcagcttttctctctgaacccgcgcagcggcagcttgatcaccgcgggcaggatagaccgggaggagctctgcgctcagagcgcgcggtgcgtggtgagttttaatatccttgtggaagacagggtgaaactttttgggatagaaatagaagtaactgatatcaatgacaatgctccaaaattccaagcagaaaatctagacgtaaaaattaatgaaaatgtcgctgcgggaatgcgttttcctctcccggaagctattgatccggatgtgggcgtgaactccctgcagagctatcagctcagccccaataagcacttctccctaagagttcagagccgtgccaatggcgtcaagtacccggagctggtactggagcactccctagatcgcgaggaagaggccattcaccacctggtcctcaccgcctccgacgggggtgaccctctccgatctggcactgtccttgtcagtgtgactgtcttcgatgcaaatgacaacgcgccggtcttcaccttgccagaataccgagtgagtgttcctgagaatttgcctgtgggcactcagctgctgacagtcacagccaccgacagggacgaaggtgccaatggagaagtgacatattcattccgaaaattacctgacacgcaattgttgaagttccaactaaacaaatatactggagaaataaaaatatcagaaaatctagattatgaagaaaccggtttctatgaaatagaaatacaagcagaagatggaggagcatatcttgcaactgcaaaagtgttgattacagtagaagatgtaaatgacaacagtccagagctgaccatcacgtctctatttagtccagtgactgaagattcacctctgggaacagtcgtagcccttttaaatgtgcatgatttagactctgagcagaatggacaggtaacctgttccattttggcgtatctaccatttaaattagaaaagtccattgacagttattacagattggtgatacacagagcccttgacagggaacaggtatcctcttacaatatcacagtgacagccacagatgggggaagtcctcctctatcaacggaagctcactttatgctacaagtggcagatatcaatgacaacccacctaccttctctcaagtctcctactttacctatatcccagagaacaacgccaggggtgcctccatcttctcagtgacagcgctggacccggacagcaaagagaatgcccagattatttactccctggctgaagacaccatccagggggtacctctgtcctcatacatatccatcaactcagacactggcgtcctgtatgcactcagatccttcgactatgagcagtttcatgagctacagatgcaggtgacagccagcgacagcggggatcctccactcagcagcaacgtgtcgttgagcctgtttgtgctggaccagaacgacaatgcgcccgagatcctgtaccccgccctccccacagacggttccacaggcgtggagctggcgccccgctccgcagagcccggctacctggtgaccaaggtggtggcggtggacagagactccggccagaacgcctggctgtcctaccgtctgctcaaggccagcgagccgggactcttcgcggtgggggagcacacgggcgaggtgcgcacggcgcgagccctgctggacagagacgcgctcaagcaaagcctcgtagtggccgtccaggaccacggccagccccctctctccgccactgtcacgctcaccgtggccgtggccgacagcatcccccaagtcctggcggacctcggcagcttcgagtctccagctaactctgaaacctcagacctcactctgtacctggtggtagcggtggccgcggtctcctgcgtcttcctggccttcgtcatcgtgctgctggcgcacaggctgcggcgctggcacaagtcacgcctgctgcaggcttcaggaggcggcttgacaggtgtgtccggctcgcactttgtgggcgtggacggggttcgggctttcctgcagacctattcccacgaggtctctctcaccgcggactcgcgaaagagtcacctgatcttcccccagcccaattatgcggacacgctcatcagccaggagagctgtgagaaaaacgatcctttgtctttgttagatgattcgaagtttcctatagaggataccccattggttccagtgagttttattttcatttttacttttgttaaaaaaaaaaagattggtttttactttgaagtttgcggcatgatggtggaaagtgtaaatgctaaaacactgatgagtagaatttgatgtttattaaggttttttttttttttttttttttttttttttttactttctggtaaaattcacctagtctcaatcaaggcctatatatcataaggctttgttatgattagctttgcagaaccttgtagtttatagtgttgttgagtacaatattgacaattcctaagacagacttccatacagaagtgcctgtcaatttatatttcctcctgggtggtcacatattgaaactccagccccttaagcaaccctcttgttctgaaggcaggtctggtaagaataggtaagtatcagaaagaaatcacctctggaaacacaacccaaatccaagaatactcaatgcagttcttcccaaggagaagggcaataggcctttttcaaactacattttatatatttttcaatctatactttgtggtgatagttgcagttgaatatactaagtttttcattaatattgaattaacaatttatttataacaatgtatgcttagatttttccagccctatttataactgataacactgcagtatcctttttgcatacaattctctaatttcacactgctatgtggaagatatagcattttaatttaactttcattgctcaatagggatcctgaggaggctatagagggtgaaattaagaatatttgggattctgcttttgtcttttttgttaaattttctagtgactaaggctgaaagtaaatatgggttgggaagacagataaatttgtacatgttcccgagaacaggagcaagagatatatgacaaagctatttcagtggctctttaatgtataaggaggcaaacacctgaaactctgaaaactctgaaattgagaggcaaaataaacttagagtcaagaaagaaatgccatttctgcagatcagaatataaacaccaaccacagctgtaaaaaagaaaagaatatatgcaacgaagggaaattatataaacaaaggatcattggaggtactgatgagttcatttagttcaatgaaaatagtgacgtattaggtagatctcttaattttattactagtattctactaaatgtggtagtataaagtcaaaaagcattccgaagtttctcaagacccttataattccatgatttttttcaggtcagtcaacatttgttgaatgataggtctgtggaaggaaagcacactctttagggtcatagttattaactattaaaccattgaaactattattttatatttgtgttaatgagagtcaaaattattgtgcattcatctcaaataattctattattttgaaaaatacaggttttttttttaaaaaaaactgctcttgacattgtagctattgtgagaaaatattttgattataattatttaaaagcaatacaggacaccctggatgatggtaatgactagggcaatggttgcattccagtacttaagtatgaaataaggaattattactttctgggtgaatataggctagaattgaagacaaaaaaatttgttgcttatcttcagtacttccagcttcatagataattactcttaaaaggaacaagaatgactgcctctggatggaggaattggatagcaatgggccgtgggataggagacctataaaccttcatgctatattattttgtgcctttttaaattttgaagaaaaaatattcatttattcaagatatatgtaaattcagtaaataaaaagatatgatagttatgaccaagtggaaatatatttcctgatgtaaaaggaatcactgaggaaaaagattaaaatattttggctgtcaactcgtagtttaaaaaaaattccttgaaagaggtagagaaaagtcaagttgcagtcccacacagagcctctgggcgccgccgtcggccagtgcagagcaagcgctgacgccggggatccctcagcctctagcctgggattccctgcgcagccaacaacagaaaagaaaaccagctcccacacagaggctcccggctgcgcagaccttgcccagcacaccagattgccagctccgagacccgggactcctcctgtcctgggccgaatgctcttttagcgcggtagagtgcactttctccaactggaaaagcggggacccagcgagaacccgagcgaacgatgggagggagctgcgcgcagaggcgccgggccggcccgcggcaggtactatttcctttgctgctgcctttgttctaccccacgctgtgtgagccgatccgctactcgattccggaggagctggccaagggctcggtggtggggaacctcgctaaggatctagggcttagtgtcctggatgtgtcggctcgcgagctgcgagtgagcgcggagaagctgcacttcagcgtagacgcgcagagcggggacttacttgtgaaggaccgaatagaccgtgagcaaatatgcaaagagagaagaagatgtgagttgcaattggaagctgtggtggaaaatcctttaaatatttttcatgtcattgtggtgattgaggatgttaatgaccacgcccctcaattccggaaagatgaaataaacttagaaatcagtgaatccgtcagcctggggatgggaacaattcttgagtctgcagaagatcctgatattagtatgaattcgctgagcaaataccaactaagtcctaacgagtatttctcattggtggagaaagacaatcctgatggtggcaaatatccagaattagtattgcagaagactctggaccgagaaacgcagagcgctcaccacttggtactgaccgccttagatggtggggaccctccccgaagcggtactgctcagataagaatcctggtaatagatgccaatgacaaccccccagtgttcagccaggacgtgtacagggttagccttcgggaagacgtgcctccaggcacctccatcctgagagtgaaggccactgaccaggacgagggcatcaactcagagatcacttattccttctttggtgtggctgacaaagctcagcacgtgttctctctggattacactacaggaaacattctaactcagcagcctttggattttgaagaagtagaaagatatacgataaacatagaagcaaaagaccgaggatctctctcaacacggtgtaaagtaattgtagaagttgtagacgaaaacgacaacagcccagaaataatcatcacgtcactctctgatcagattatggaggattcccctccaggagtggttgttgccctcttcaaaacacgggaccaagactcaggggaaaatggggaagtcaggtgtagcttaagtagaggtgttccatttaagattcattcttcttctaataattactacaagctagtaacagatgaggccctggatcgggagcagaccccagagtacaacgtcaccatcgcagccacagacaggggcaagcctccgttatcctccagcaaaaccataaccctgcacattactgacgtcaatgacaacgcgccggttttcggacagtcagcctacctggtccacgtgccagaaaacaaccagccgggtgcctccatagcgcaagtcagtgcctctgacccagacttcgggctcaacggccgtgtctcctactctctcattgccagcgacctggagtcacgaacgctgtcgtcctacgtgtccgtgagcgcgcagagcggggtggtgttcgcgcagcgcgccttcgaccacgagcagctgcgcaccttcgagctcacgctgcaggcccgcgaccagggctcgcccgcgctcagcgccaatgtgagcctgcgcgtgttggtgggcgaccgtaacgacaacgcaccgcgggtgctgtaccctgcgctgggtcccgacggctccgcgctcttcgacacagtgccgcgggccgcgcagccaggctacctggtgaccaaggtggtggccgtggacgcggactcggggcacaatgcctggctgtcctaccacgtggtgcaggccagtgagcccgggctcttcagcctggggctgcgaacaggcgaggtgcgcatggtgcgtgctttgggtgacaaggactcggtccgccagcgcctgctagtcgctgtaagagatggaggacagccacccctttcagccactgccacgctgcacctggtgttcgcagatagcttgcaagaggtactgccggatttcagcgaccatcccacaccctctgactcccaggctgagatgcagttttacctggtggtggccttggccttgatttctgtgctctttctcctcgcggtgattctagctattgctctacgcctgcgacagtctttcagccctactgcaggagactgctttgagtcagttctctgctccaagtccggacctgtgggtccccccaactacagtgagggaacgttgccctatgcctataatttttgtgtgcctggggatcaaatgaatccagaatttaattttttcacatctgttgatcattgtccagccacacaagataacctcaacaaagatagcatgctactggctagcattttaactcccagcgttgaagcagataagaagattcttaaacaggtaagtatttaaaaatgtatttaatcctttttatattacaatatgccaatatattccaatatagtggtattattttaagattctagataacttcttcatagagttcgcaaaatataggtcaaatttatggttatcattattaaaacaaaagtttaaattaaatgcctcagtcttcctactattcaaagacattttaaagcaaactacatgggtaatctccggtgacatttttatgaagtaaaatacctttcggttaaaaatataaaatacaggtatatttttacggcatggtattttaattgaaaccctgatgctactcaatttttctcaagtatttcatcttcatttactcaataaaggaaccttgtaagaattatagttaggcatcctacctgatgattttatcgggaccgtattatttccacttccagaaatgtcgttcctttcagtcggttaaaatcaattggaaccaactacaacctacaagttttcagctccagtaatattttgaaaactttttaaaaattaagcaagcccttttaataattactcctttcgcaggtgttcttggtaaagttttaacgtcacataatgtaagtattgtgtatcatcgtttttaagctctacaaatacgtgtgattcacaaaggtgagcgtaatcatttcttctggaatttcttagtcgttgcaataataagaatgggctctaggcgccgctgctcaccaatcagggaatgggaagctgcgcgccattgagtccctccctcccccgcctctaccacacaaagcggaatgagatggatactcacagatcctgacactggagacttagaagtattttccttcgctttctgatatattttggatgtagtcggcctaggacttcatagatacataagccgattcacaaccaaccagctcgagaaaccgcggaatatcggcttagagcctgccatggcgaatcggctacagcgcggggaccgcagtcggctgctgctgctgctgtgcattttcctggggacgctgcgggggttccgggccaggcagatccgatattcggtgccagaagagaccgaaaagggctccttcgtgggcaatatctccaaggacctggggctggagccccgggagctggcgaagcgcggagtccgcatcgtctccagagggaagacacagcttttcgctgtgaatccgcgaagcggcagcttgatcacggcaggcaggatagaccgggaggagctctgtgagacggtgtcctcctgttttttaaatatggaacttctcgtggaagacaccttgaagatttacggagtggaggtggaaataatagatattaatgataacgcccccagcttccaggaggacgaagtggagataaaagtcagtgagcacgcaattcctggggcgcgatttgctcttcctaatgctagggatccagatgtgggcgtgaactccctccagagctaccagctcagccctaataattacttttccttgcaactgcggggcagaacggatggggccaagaatccagagctagtactggagggaagcctggaccgagagaaagaggctgctcacctgctcctcctcacagctttagatggaggcgatcccatccgaaagggcgcagttcccattcgtgtggtggtcctcgatgtaaatgatcacatcccaatgtttacacagtccgtatatcgcgtgagtgttccagaaaacatcagctccggaactcgggtgctgatggttaatgcaacggatccagacgagggaatcaacggggaagtaatgtattcatttcggaacatggaaagcaaggcttctgaaatattccaattggattcacaaactggagaagttcaagtacgggggtctctggattttgaaaaatatagattctatgagatggaaattcaaggccaagatggtggaggtctctttaccaccacgacgatgttgatcactgttgtggatgtgaatgataacgctccagaaataactatcacctcttctattaattcaattctggaaaactctcctccaggtacagtgattgctcttctaaatgtgcaagatcaagattctggagaaaatggtcaagtctcctgttttattcctaaccacctgccttttaaattagaaaagacttatggaaattattacaaattgataacaagcagagtgctggacagggagttggtccagagctacaatataacgttgacagccacagaccagggaagcccgcctttgtctgcagaaactcatgtctggctgaatgtggcagatgacaacgataaccctcccgtttttcctcactcctcttactctgcctacattcccgaaaacaaccccaggggtgcctccatcttctcagtgaccgccctcgacccggacagcaaacagaatgccctggtcacttactctctgacggatgacactgtccagggggtgcctctgtcctcctatgtctctattaactccaacactggtgttctctatgccctacaatccttcgactatgagcagtttcgagacttagaactgagagtgatagcacgtgacagcggggacccgcccctcagcagcaacgtgtcgctgagcctgttcgtgctggaccagaacgacaatgcgcccgagatcctgtaccctgccctccccacagacggctccactggcgtggagctggcgccccgctctgcggaacctggctacctggtgaccaaggtggttgcggtggacaaagattcaggccagaacgcctggctgtcctatcgcctgcttaaggccagcgagccgggactcttcgcggtgggggagcacacgggcgaggtgcgtacagcgcgggcactgctggacagagacgcgctcaagcagagcctcgtggtggccgtccaggaccacggccagccccctctctcggccaccgtcacgctcaccgtggctgtggccgacagcatccccgaagtcctggcggacctcggcagcctcgagtctctggctaactctgaaacctcagacctctcgctgtacttggtggtggcggtggccgcagtctcctgcatcttcctggtctttgtcatcgtgctgctggcactcaggctgtggcgctggcataagtcacgcctgctgcaggcttctgaaggcgggttggcaggtatgcccacgtcacattttgtaggcgtggacggggtacaggctttcctgcaaacctattcccacgaggtctctctcattgcggactcgcagaagagtcacctgattttcccccagcccaactatggggacacgctcatcagccaggagagctgtgagaaaagcgagccactcttgatagctgaagactcagctatcattttaggcaaatgtgacccgacaagtaatcaggtgagatttatttctctgcctcctaattgttggtgtcttggcacaagtcttttaaggagatgttttttgagcctgttatgaaaactgtttggggggggggtggggcggcatatatttagttcatatatatttagagcaatacatgtgagttttactttgcctttcatgagattacgataatctttcagaacgtttttgtgaaagtcatttttcaatcttggcatattttcttttgatttcaaaggggccattcaactatgctggtttggtttgaagtaagttgaattttagtattatttttctattatcagtgtatgaggctctcaatttattatatatagatacaaattaatgattcacaaacactttttatttccatttcaattttgctgtgccttcactgatttgtagttatattccaccattatttgctattactgctaatgttcaaattttgatcctgttgatttaatagcatgctccctctagctctccttctcatctatctatctatacacatgcacacacacttatacacgtaagcttttctctgagcaattttattttgattcttggtggctggtaatatgcttagatcctgttgactatttcaactttgtctcatttcttcatcctatcaacacagacatattgactggcttttaactactggatttccttgggagataaaatttagatcacattttttcttaagctctagatgtcttttccattactatggtgaagttacattgactgttctgaggaaataattgaattattgaactggtattatttccttttattcttttactttggtgtctgtgtttgtatgtatggaaggttttttaatgtagtaaatccatatatagaaataacttgattttgattcagtgcttctcaaaaacctattttcaaatgtgctaaagatgtctacagatttattcaaatagagtagtttgtgaatatataaatagattgaaggtatttggactttaattaaactgatttagctagtatccttctggctatttttttgttcattttcagtgtagttgggagtcatagattccttctttctttctttataaggtcattcttatggcaaatagtacattcagttcttttattcagaccaacttgttattgaagcttgatagttgcctgacatacatgttatctgaagcaatgtctaggaaagccaaatgaggaaaggagacttatctagggtttttgatcacaggaatcatttccataatcaattcagtcaacactctcacatcacttctaggtatttgccccaaattacttggatatttatgttccctttcaagtttagttttctcatttaggaatttaccttatgtcattagttgtaaactgactatctagggctcggacaaaaataatttcaactgtaggaaaggcaagtcttccaacagatgcctacatttttcttgaagtcaagaaaaatgttcaggtattttgagcatctagggataggatttatacttgtggaattccaaactgagaaaaatgatgtaaggcattgtactttgactggaattagttaaataaaaaggatatgaggtatttggctgggaaaaggagattgttccatattataaaacctcatctaaactaacttcccaagatcgtggagaacaaaaaggaagggttggctttgaaatgtgatattaagagggttatgttgattcggaggtagtgataaagttctgttaaggtataacatatagtcccattaaatagaggataaaaataaaacaccatcacatttcatgttattaattcctatggcaacctactaggctatacctttatattctctttatgatgaaacatgaaacaataatccttttcagaaacctcttttataagtgataagaagggtttggctaactttattctgaatatgccctatatagctttcagtgctcctccagttttctctgataaaactaggaggaaaattatctgcacatcagattgaaaataatactgcatatcatttcatagtggtcaaaattttcccataccacttgatggggatgttttcccacaaggtttttgttctacaacaggagagaagactttgcctagttcttccaatatgtgcattgcttctgcttagaaaaaaacaaacttttaaattctctttgctgggttaatgactgttctatagattcccatctctaaggaatcttctttggtagtaaacactggaaaacagtcactacgaaaactcataaaatgtctagtttcctatacattagtccaacacatcagtctaattctgaatcccattgaattagcaaaggcttccggctgcagttttctaaatagactcagagccctgctgttggccaatgtgctgcaagaactggagcctgggatctaccaggacgatattctgttcagtcacagaagcaagtcggagagtggccaagacttgggctttctgctcctgcaaatctgattccatacggattggggtgccctcaaactgggagcattgagttttctatgtatggaagtaaatattttaaaagcactttgtgaaacattttctcttaacgtcggagactgcagcaacgcatgggaaggatgggaaacagggtgaagcagagaagcaggacccggcagtggcaagcactcttccctttcctgctgcctttgttctgcggggcaccctcggagcagatccgctactctattccagaagaaacggtccagggctccgtggtggggaaccttgcggaggacatgcggctgcatgttcaggatttattgacctgaaaccttagagttagtgcagagaaacaatactttaccgtgaacacggagaatgggaacatacttgtgagtgacagaatagatcgagagtcactgtcttcaaaatcctctgtgtcatacccttagagattgtagcagagaatcctctaaatgtttttcacataaatgtgatgatagaagatataaatgataacccacctcattttccccaaaatagcattgttttacaaatcaatgaactagcaattccaggcattcggtttggcctggaatctgctatagatgcagatgtagggcctcactctctccagagttaccagctcagttctaatgaacatttctctctgatgatggacaagactaaaggcaagaacgctccagaattagtgctggagaagcccctgggccaggagcaacagagctctcatctcctggtcctggaagcaatggacatgggtgacccagtcccaactggcactgctgcaattcaaattgaggtcactgatgccaacgataatgccccagtttttagccaggatgtatacaaagtcagccttagagagaatgtgcccccaggcacctctgtactaaaggtgacagccactgaccaggatgagggtgtcaatgcggagatcacctactctttcaaatccctacgagatgatattggaaatatgtttgtgctagaccatcaaaatggggaaattaaatccaaagacttaatagacttcgaatttcgtagcagttataccatgagagtagaagctaaggatggtggaggcatgaccagcgaatgtaaaattatactagaaatcctagatgagaatgacaatgccccagacgtggtttttacttcagtgtccagttctgtaactgaggacgcagaaccctggacggtgatcactctgttcaaaacacatgataaagattcgagagaaaatggggaggttacatgcctcataaacgaaagagttccttttagaatcgaatcttccgccaataatgactataagcttgtaacagatgggaccctggattgggagcggatcccggagtacaacgtcaccatcactgccactgacaagggcaagcctccgctctcatccagcacaagcctcaccctacgcattggtgaagtcaacgacaatgctccggttttccaccaagtctcctacgtggtccacgtggccgaaaacaaccttcccggagcctccatcccacaagtcagcgcctctgacctggacctagggctgaatggccaagtctcctactccatcgttaccactgacttggagctgcgggcactgtcgtcctacgtgtccgtgagcgcacagagcggggtggtggtcgcgcagcgtgccttcgaccacgagcagctgtgcgccttcgagctcacgatgcaggcccacgaccagggctcgcccgcgctcagcgccaacatgagccggcgcatgttggtgggcgacctcaatgacaatgtgccgcgggtgctgtaccccgcgctggggcccgatggctccgcactcttcgatatagtgccacgcgccgcagagtccggctacctggtgaccaaggtggtggcggtggacgcagattcgggacacaacgcttggctgtcctaccacgtgctgcaggccatcgagcccgggcttttcagcctggggctgcacacgggaacctgctggttgctgtgcgtgacggaggacagccgccgctctctgcgccgctacgcttcacctagtcttcgcagacagcctgcaggaggcactgccagacttcagtgacagtcctgtgccctctgattcccaagcaaagctgcagatttacctggtcgtggccttggccttgatttctatgctcttcttcctcgcagtgattttggcggtcgccttgcacctgcgatgctcttccagcccctctgcctggggttgctttcaccctggtctctgttctaagactagaccaggggtttttcccaactacaatgagggaactttgctttattcctgcaatctgtatgttccctcggattctagaaaaagaagatttaattttctcaccatgacaccagaaacagtccccccacaagatctttctaatgaagtttctctggtagcaagcttcactgaagagaataacaagataagctctaactctgttgctcctactcacgtgagttccaatgaatgtctttcatttacaaatggatgaggtttaattttcaaaccaatattttggcaagaaaatcttaaacatattatatctactattgcttcaggtttgtttgcccactcttaatatttcctgttcctttctgtgtgggccagtaacttcattattagctttcatgtatttttgaaacattttcaccatttttacgggagactttttttttttttggacggagtctcgctctgtggtccaggctggagtgcagtggcatgatctcggctcactgcaagctctgccttccgggttctggccattctcccgcctcagcctcccgggtagctgggactacaggcgcccgccaccacgcccggctaattttttgcatttttagtacagacggggtttcaccgtgttagccaggatggtctcgatttcctgacctcgtgatctgcccgcctcggcctcccaaagtgctgggattataggcgtgagccactgcacccggcccggagacattgtttatacacacacacacacacacacacacacacacacacacgtgtgaaaagtgggtattatgatactgctgtcattgagatattttaattgaggaataaatttttttcctgtgatgtttcttgggacatcaatatttgagtatataaggctttttctttaatccattaactataaattttgaagaaaatgcatgagaaaatggagaaaatgtgttttttttttaaaaaaaattgagattaaggtctcattatgttgcccaggctggactcaaactcttgggctacagtaatcctcccacctcaatctccagagtagctgagactacagttgcctgaaactgtgcctggcagagaaaaaagcttaaaaaaataagaacatggtaatgatttgataatattcagttacatttacttttgattcttgtaattcaagtaaactcaattttatgtctgatattttctcacagctacctatatatttcttcccaatttaaaatatattattttattttatgcctagcaaatatctttacagtataaatatttacgctcatgaaagtacgtagccagttatttcttagggagaattttttccctatattttgatgggcttccaaaagtattaccagtaattctcagtaattacaattaggtcagttacccaggaaaaggtaagtctgtaacattctttggactaccaattttcttttactaagtttcctgaacaataaatatttttgaaatataatgtattaatagaattctggagtacttccattatttccagtcaatgcaagttggaatgcttctactttatgctaaaaatattaatgtttctttttcacttgggttcttgttaagtgtgattctgataatgtatacaatcacatatcatttttaggtttccataatatcatgaaaatttgatttttaagcgttacatgtcaacaacctggtaaagtaatccttccattcaggatcattcaaggaatctatttaaaaatattttccccaaattatagctgaatcagaaagtttaaattattatattatatgatttgtcaaaaagagaaactcctagggagacatctccataataggtgtgttgggggaacagtaatctcaaagcagatgcactaacattataagattaaaatcattgtttatagaaacttccaattcatttaaaagctcattggggaaaaaaaagctcattgggaaaaaaaaaaaaagctcactaaagtttctattaaagcgaatacggtagatttccatccccttttgaagaacagtaggtggagctatttaagatataaaaacgaaatatcctttctgggagttcaagattgtgcagtaattggttaggactctgagcgccgctgttcaccaatcggggagagaaaagcggagatcctgctcgccttgcacgcgcctgaagcacaaagcagatagctaggaatgaaccatccctgggagtatgtggaaacaacggaggagctctgacttcccaactgtcccattctatgggcgaaggaactgctcctgacttcagtggttaagggcagaattgaaaataattctggaggaagataagaatgattcctgcgcgactgcaccgggactacaaagggcttgtcctgctgggaatcctcctggggactctgtgggagaccggatgcacccagatacgctattcagttccggaagagctggagaaaggctctagggtgggcgacatctccagggacctggggctggagccccgggagctcgcggagcgcggagtccgcatcatccccagaggtaggacgcagcttttcgccctgaatccgcgcagcggcagcttggtcacggcgggcaggatagaccgggaggagctctgtatgggggccatcaagtgtcaattaaatctagacattctgatggaggataaagtgaaaatatatggagtagaagtagaagtaagggacattaacgacaatgcgccttactttcgtgaaagtgaattagaaataaaaattagtgaaaatgcagccactgagatgcggttccctctaccccacgcctgggatccggatatcgggaagaactctctgcagagctacgagctcagcccgaacactcacttctccctcatcgtgcaaaatggagccgacggtagtaagtaccccgaattggtgctgaaacgcgccctggaccgcgaagaaaaggctgctcaccacctggtccttacggcctccgacgggggcgacccggtgcgcacaggcaccgcgcgcatccgcgtgatggttctggatgcgaacgacaacgcaccagcgtttgctcagcccgagtaccgcgcgagcgttccggagaatctggccttgggcacgcagctgcttgtagtcaacgctaccgaccctgacgaaggagtcaatgcggaagtgaggtattccttccggtatgtggacgacaaggcggcccaagttttcaaactagattgtaattcagggacaatatcaacaataggggagttggaccacgaggagtcaggattctaccagatggaagtgcaagcaatggataatgcaggatattctgcgcgagccaaagtcctgatcactgttctggacgtgaacgacaatgccccagaagtggtcctcacctctctcgccagctcggttcccgaaaactctcccagagggacattaattgcccttttaaatgtaaatgaccaagattctgaggaaaacggacaggtgatctgtttcatccaaggaaatctgccctttaaattagaaaaatcttacggaaattactatagtttagtcacagacatagtcttggatagggaacaggttcctagctacaacatcacagtgaccgccactgaccggggaaccccgcccctatccacggaaactcatatctcgctgaacgtggcagacaccaacgacaacccgccggtcttccctcaggcctcctattccgcttatatcccagagaacaatcccagaggagtttccctcgtctctgtgaccgcccacgaccccgactgtgaagagaacgcccagatcacttattccctggctgagaacaccatccaaggggcaagcctatcgtcctacgtgtccatcaactccgacactggggtactgtatgcgctgagctccttcgactacgagcagttccgagacttgcaagtgaaagtgatggcgcgggacaacgggcacccgcccctcagcagcaacgtgtcgttgagcctgttcgtgctggaccagaacgacaatgcgcccgagatcctgtaccccgccctccccacggacggttccactggcgtggagctggctccccgctccgcagagcccggctacctggtgaccaaggtggtggcggtggacagagactccggccagaacgcctggctgtcctaccgtctgctcaaggccagcgagccgggactcttctcggtgggtctgcacacgggcgaggtgcgcacggcgcgagccctgctggacagagacgcgctcaagcagagcctcgtagtggccgtccaggaccacggccagccccctctctccgccactgtcacgctcaccgtggccgtggccgacagcatcccccaagtcctggcggacctcggcagcctcgagtctccagctaactctgaaacctcagacctcactctgtacctggtggtagcggtggccgcggtctcctgcgtcttcctggccttcgtcatcttgctgctggcgctcaggctgcggcgctggcacaagtcacgcctgctgcaggcttcaggaggcggcttgacaggagcgccggcgtcgcactttgtgggcgtggacggggtgcaggctttcctgcagacctattcccacgaggtttccctcaccacggactcgcggaagagtcacctgatcttcccccagcccaactatgcagacatgctcgtcagccaggagagctttgaaaaaagcgagccccttttgctgtcaggtgattcggtattttctaaagacagtcatgggttaattgaggtgagtttatatcaaatcttctttcttttttttttttaattgctctgtctcccaagctggaatgcagcggtacgatcatagctcactgcagcctcaaactcctaggctcaagcaattatcccacctttgcctccggtgtaacagggactacaggtgcaagccacctactgtctgcctatctatctatctatctatctatctatctatctatctatctatctattactttcttgtacagacaggagtctcactatgttgagcaggctgatctgaaacttgggctcaggctagcctcctgcttctccctcccaaactgctgggattacaggcgtgaaccacagtgccccgcccttatcagatattcttttctggctgggcgcggtggctcacgcctgtaatcccagtactttgggaggccgaggcgggtggatcacctgaggttgggagtttgagaccagcctgaccaacatggagaaaccccgtctatactaaaaaaatacaaaattagccgggcgtggtggtgcatgtctgtaatcccagctacttgggaggctgagtcaggagaattgctttaacctgggaggtggaggttgcaatgagctgagattgtgccattgcactccagcctgggcaacaagagtgaaactctatctcaaaaaaaaaaaaaaaaaactttatcctctagtttcatccattgatgacacttgctttaatcacttattacaatcacctccaaatgaagattttataattccattgtttcttctacagttgttaattggctttctaccttgaagaagagttttatattctctatatatgtttgtttctatgattctggaagcatggttttctattttattcaatggcctgtaatctgttaatatcaattatttattttgatgctgaaattgtcccaggattggcctttgggactccctttaggctgatttctatgtcctttctgttacagcaagcttgggattatatccaagatttgtaattccaatgtacttacttctgtcagtgtaaacaaagtacgatttctggactagatgacttgggcattgtgggggaggtggaaattagaggtattctctgtttttcctgtaggatcttgcatttcttcctcttgctgcttgtctctttgtgtcgggaacaggccccccaaaatctggccataaactggccccaaaactggccataaacaaaatctctgcagcactgtgacatgttcatgatggccgtaatgcccatgctggaaggtagtgggtttaccggaatgagggcaaggaacacctggcccgcccagggcagaaaactgcttaaaggtgttcttaaaccacaaacaatagcatgagtgatctgtgccttaaggacatgcccctgctgcagataactacctcaatccatccctttatttccgcccatctcttcgtttcccataagggatacttttagttaatctaatatctatagaaatgatgctaatgactggcttgctgttaataaatatgtgggtaaatctctgttcagggctctcagctctgaaggctatgagacccctgattccccacttcacacttctaaaaaaaaaaaaatttttttttctgagcttggagaaatatatcccttagtacacttggcatttataaagcagacatcaataaatttatatatatgtgacagataccaacaacaatccagtccccttccctcataccttatttatgtacatatattttatataatagatataatttattaacaatttataaaattactttgttaatactctatatcattttctagctgaatttatcaatgataatgctcttttcccacttttatttttttcccattgaccatgcagcagttttgtgtagaccgtctgataacaactgatctgtttatctaggggggagaaatctaattcaatggaaaatataaataaaattgtgataaacttttgtaaatagagtggcttttaactacacttgagatggctagcaaattcataaagtgaatttactttctttcaaagttcagtaattctttctggccattagggatatgtccatttatactttctcagtatcccaagtcatttcatggttttaaatcattcatgaacttccaaatatagtgaatttatttcttctgcatttaaaattttatcacttaaatatacaatataccgtattgccatgacgaaaaatggtaaagactatttttcacttctgttatgcatttcattaatacgatatctgtatgtgtttccaagttagacatttcttttgcccatttcctacactaatgatactaatgatgactttgtggaatattcagaattaacaaaatgtgttttgagtgctttttttagtactggggcaaatttgcagtaatatcgcctgctttttacattaaattccccataacttttacaactatgggaaaatttctgaaacgtgcacagattccaagtgttttctgagaactttatgcttattgtagagtggttacagacactgaatgctaaagtgtattactctttgaaaagcattgcttgatttcttttggtgaattctgtaaaggtgcagggaaacataacgtcccaattattttttctttcttctttgtttgctgcctatctactttgaaagatacaatagttaaaacccagaaaagagattggaaaccccttagagaatgaaagacatccaagggctctaaaatgcggcagttgctgcttctgagaccaaaaaagggggcaaaatatagagtgtgtggttctacttgtgtgattttttgaaagaaagtatttgaatttatctaaaaatactaaatttgtatttacattagttttcaaatagaatttaataagtacagtgttctataggtaatattgagagaaatagaggacaatgaaacctctctcctccatcatcttgtatgaactaccaaaatgtttatcatatggacagttctcatatatagtcaaatagaaagaaagacataataggaaaacaaatgacttgggaaactaagctaacatggtctaattattctgacctctgctcacctaacttgatttaggaacaaatcattgagagttagagcatgaatagtcaagactgttagaccatatctcaaatatcagtgacttcaatcaactatgtttccagtttaagctgaataggctttattaaatagttgttgaatgaatggataaacaaataatgtactctggggattacctgataccaggattctgaattttcagatgtatcatagaaggatagcagctttgcaattaggtaaattgttaactgtgtcacctttagcaagttatttaatctctttgagcttcagcaaagtaggaataatcatatctaatttgaaaggtcgtggtgatggctagggctaacaaaaatctgattcacaacatgcaattaattaacagtagccatttttagtggttgaccaaaaaaaggatttatattttcaatgccagcacactcgatgttctgttgggaaaaataataatgatttttgtgtgcttctccatatggtataatggaatgatttgtggatggaaataaaactgttctaaaatttttgtgacagctggtttaaaaatcttaagtgcctaggcacattcttgattgagaagccacagttttaggccataaaagatgggggaaagatttttatatgagacaattttgtgagtgttactttttctttgtctgaaccatagtgaaatctaaacaaggatcttgtgaaacttattttaaagaagcagtttacttcaatgggatcttagataatttcaccagaaaatggatcaccgaaaccagaaggctggtgatcattatttggtttgggccatataagaattgaaactaacggcttagctttaggatttttaggacacttgttgataatttaggattcataattaacatatgtgttgattgttttctgagactaactgggcaatgggtttggatgtgtttacatttattctgattccagtcataaaattatgtcaaggactttccttgtctttttatgtgtatgacagatgtgtatgtatccatttcatctaacaagttaaagcgttcagctataatttaaaatttgtagcttcactgttttatagtacctaaaattggaatgtaatcagtcagaagacattcatccactgctttcattccagaagtattatgctttttgaagcagcaatagcataggaatgttgaggagactatactatacttttatagcatatttaatctcgtagatcacttttcaatgaattataaggctgatgacaaatgagcaaattgtatcagttttctttatgacatgtaacagagtatagctgtgatcatgaattggatagttctggtgtaaaaatctgctttatccccatataagatgtcaggttcagaaaagcaaacacatagtttcgaagagatgttgatcaaactgatgaggctaaatctcaagaaagagacacagttaccctctaatgttacactttgagttcacctttttttttttttttgagacagagtctcaatctgtcgccaagctggagtgcagtggcactatcttggctcactgcaacctctgcctcctgggttcatgctattctcctgccttagcctcccgagtagctgggactacaggcacacgccaccacacccagctaatttttgtatttttagtagagatggggtttcaccatattggccagaatggtcttgatctcttgatcttgggatgcacccaccccacctcagcctcccaaatagctgagattacaggtgtgagccaccatgcccgaccactttgagttcacttttaagaaaccatacttaatggaaaattaccagtaacagggcatactgtttaggatgcattcctaaaatattaatggcaaaagatagccagcctatggcaaagctaattggaaaaaatattttataaaggatgagacttctggataccatatgggaagggctctggttcaggaaaatgtttttaaaaaactgtcattgaagagaccatagaatcaaacaaaataatttaatctgtatgtaaaagaagttggtaccaccataatttttcttatacatgtcatataaggatctactctgtgtattgtcattgagggcagatataatttcttagttcatcattaactctctgaagtatttcacacagtagtttgtacaccttctaagtactcaatacaatgcttgagttcaattattggaaagtggtctcttggagaaaaaagaatcatagtgcaaaaccaattattttacatggacttttcctctatatctaagccctaataagaggcagctgtctgatatacatacatacatacatacatatatatatatatatatatatatatatatatatatatatatatacacacacacacacacatatatgtatatatatatttggagtaggggatggagtcttgctctgtcacccaggctggagtgcaagtggtgtgatctcagctcactgcaacctctgcctcctgggttcaagcgattctcctgcctcagcctctccagtagctgggattacaggcgcctgtcaccatgcccagctaattttttaaaatatttttagtagagacagagtttcatcaagttggccaggctgctcttgaactcctgacctcaggtgatccacctgccttggcctcccaaagtgctgggattataggcatgagccaccgcaccctgccaactgtctgacttatcttaaaaggctaaggacctggtttgtttgtcaaattttgaaaatagatgcctcagttcataagatttccatattgtgtggcaggcgcctgtaatcccagctactcaggaggctgaggcaagagaatcacttgaacccgggagacagaggttgcagtgagctgagatcacgccactgcactccagcctgggcgacatagtgagactctgacaaaaaaaaaaaaaaatccatatgtgaaaattcttagaagcttcctatacaatttcagctgaagattcagccaacagttcattctgagactgtgttccatggaaaaagtaaagcccaggcatggaagtgggaatggaaagaaagattctaagcctacaaatactcaaacatcaagaagaaataaaaataagtcatcacttcgacttcatgtgctaacatcactgaggttataaattcccaggaatattttattgcgggagcaagactgcactgctgcctttcagcttgcaaattccagtgagaaacgtctttctctctgctctcaactaactctacagaacgctgtcctctcatttcttcaggctgcagttctagagtagggactcagagtgccactgttggccagtctggaaacagagataaatgagccaatccccagacattccggcttggtggcttttctaatttcatggaatgcaaatccaagagcagacccacaacattcctattatggctcctagttctacaaattataagcaggaacggaacggatttacaggcaatgagttcagctccttcttggctggagattctataatccaagaagagtttgaaaaggggcttatttgggctggagcagcagcaactctaactgtggaaaaggtggggaatggtgctggactgacagtctgggtagaaccaaggcgactactgcctcctttcctgctatttctatcctgctgggcattctctatgatgcagatccgttattcagtcctagaggagctggccaagagtttggtggtgggaaaccttgccaaggatctgggactcagtgtcgaggacatgcccacttgaaagcttcgggttaatgctgaggaataatacttcattctaagtggggaaagtggagacttacttgtgaatgactgaatggatcaggagcagatacgccccccaattatagcttgggccataacgctttgaaatagttgaaggccaggcatggtggctcacacctgtaatcccagcactttgggaggccgaggcgagcagattacgaggtcaggagttcgagaccagcctgaccaacatagtgaaaccctgtctctactaaaaatacaaaaattactgggcatggtggtgcaggcctataatcctagctactcggggggccgaggcaggagaatcgcttgaacccgagaggcaatcgcaccactgcactccagcctgggtgacagagcaaggcgccatctcaaaaaaaatgaacaaacggtagttgaaaattctttaaatgtttttcacattaatatggagattcaggatatgaagaatcatgcaccacggttcagcaggaatgttattaagttacgtatctctgagtttacccagctggaacaagatttgcaacagaacctgcagaagatcctgatgttgagagaaattccttacaaaattatcaccttagcagcaactctatatttctctttgaagtaaaagtgaccaacagtggaaagacatatgttgatcctgtgttagagaagctgcttgactaggaaaagcagagctcccatcccttagtgctagcagccttagacggccccccaacaaagcagcatcactcaactcctgatcctattggttgaagccaatgacaaccctgtgttcatctaggatgtgtacagcgtcggccttcaggaagatgtgcatccgggcactcctgtgctgagagtgagggccaccaaccaggactagagtgtcaaggcagagatcacatatggcttcacaacccagagtacccatatctagtttggccttgatcaaatagtggagaaatgaaaactttaagtacattggacttttaaagatttttaatttccatggttttggtagcaagtgacagagagggactcattgtccagtgtacagttgagaccgaatttctagaagataatgacaatatcctagaggcgatttttacttctaattccacaatgattcccaaagattctgcaccttggacagtaatcactgtccaggatttaaatcacaagatctttaaatcacaagatctggattcgggagaaaacgaggtcacatgtctgatataagaaaatgcaccttgagaaaaatcttcctccaataattaactacatgcttgtaacaaatggggccgtggaccaggaacagacccaaggtataacatcagcatcactgccactgacagaggcaaaccaaccctctcgtccagcccaagcatcaccctactcattggcgatgccaacgacaatgctctggttttctaccaggcctcctacgtcgtccacgtggccaagaacaatcttcccaaagcctccatagtgtgcaagtagacacctccaacctagacttgggacccaacagccaagttccctattccatcgtggccagtgacctggagccacaggcgctgtgattctaggtgtccttgagcgcacagtgcgccttcgaccaagagcagccgcgagccttcaagctcacgctgcaggcccgcgaccaggactagctcgcgctcggcgtcaacgtgagcctgcgcgtgttggtggacgacctgaatgacaacgcaccgcgggtgctgtaccccagctctggagcgcaatggcttcgcgctcttggatatggtgctgcacgccgcggagcctggctacctggtcaccaaggtggtggctgtagacgcagatgtgagacacaatgcgtggctgtcctaccacgtgctgcaggccagcaagcccaggctcttcagcctggaatgcgcaccgacgaggtgctgacagctcgcacgatgggccacaggaaagcgactcgccagcgcctactggtcgcggtgcactgcggtggacagccgctcctctcgctaccgccacgtcaccaccactaccgcccctcgtcgccgacagcctgcaggagactctgccagacctcagcgatcactctgcaaagctacagcctgaatccaaaattaatttatatctggtgattgccttagctttaatttcctttttattcttcctgattgcattgtttgtgctggttttaaagtgccgaagaccccaaaatgatcctgtctgagtctttcccacggatgtctatcccgcgctaagccccaggtttctgggtaactgtagctctatgatgccatattcctaccaggtgtgtgcttctcctacgaatccagggctgagtgaacttcttttttgaatccctacccctcaggactcaatagcagtttcactgcagaaagccccttggggaaggggatgattgtgattattctaattgcttgggcagaatccactctccaaggtgaaaaattcttgatgaaactaagttcagtcacaagcaggttttcttctagcattaaatattttcagagatctcagtaaaaagcatttctagcagcaagaccaaaggcctaagatgagaaatatttggcatggtgagcttgagggacagtagtcaggcagacaagagtatcagacatgccagagcatttggggcctgtaggtaaggagcatgttttgattatatatatttgtatgtgtttgattatattttataattttactttgatattcaaattgtactgatccaaaaataagggagggacaaatcttggccattgtagtatgagagatgtaaatttacaactcagaatccctgcttatcacttctccttcagcacacaactgtttcattttctatttaagaaacttcctctcactgcaaaaagacattctggctgataaagttagcctataatttcagtaaatctaagaatatgactaatggaagttgccagacctaaactttgaaaattattgttccactgaagagcgtcttatgactgagtgttccagtctccttctcaagctgaaccttgcttttcaaaccagattaagaacactatcataagttatactgcattttatttccctacccatgtccactgcatcattctctatagtacaaagagcttgtctcgccaggcgcatctataatcttagcactttggggcgccaaggcgggtggatcacttgagcccaggagtttgagaccagcctggacagcatggcaaaaacccatctctacaaaaaaaaaaaacaaaaattaacaaggtttagtggtccatgcctgtggtctcagctacttgggaggctgaggtgtgaggatcacctgagtctggggagattgaagctgcagtgagctgtggttgcgctcctgtactccagtctgggtgacagaattagaccctgtcccaaaacaaacaaacaaataaagagcttctctccttatgacttatttaaagcttgggaaattgttccaattcaaatgctttaaatggacttgagctaaaacagaatgtggtatatgaaatgttcttataatcaggtgattgtaaaaattgatccagataatgttagcatagcattttactgaactagtagtttacaaacacttcaaaaattatagaataacatttgcatataaaattcctcatacatttccctatcagtgaattggaagcttacaatatacaatattaccaaaaagacaaaaaaaatgaaaaggaaacagttacctttggaaaacataattaggtaaaatgggtaatatggaaagtctgaaaactgaaaaaattactgataagtcaagagaaaaggaatattagtaggaaaattcataaaagtgtgtctgactactcacagcaggtttccttattggtatgtattctgtggtccatctaagctatgttaattttattttaaatgctacctgggtattggcttctaaaaggaattcagtaaatcagataatttggcatcttcaatctagattctgatgctcacctgaaaagtctgctaaggattggaaaccaagaaaagtgaagtatctcaacagatatgtgtcacttgtgtgtactggattttttttttttttttttttttttttttttttttttgagatggagtttcactcttgttgcccaggctggagtgcaatggcatgctctcggctcactgcaacctccgcctcccaggttcaagtgattctcctgcctcagcctccctagtagctaggattacaggcatgtgccaccacgcccagctaattttgtatttttagtagagacggggtttctccatgttggtcaggctagtcttgaactcccaacctcaggtgatcttccctccttggcctcccaaagtgctgggattacaggcatgagtcactgcgcccggtcgcgtactggatttatattgtgtaatactttgctctagcagtatagtaggtgagacagtgactgtgtctagtgagcaaaaggcacttatttgacacttttgactcttcctttctacttaccttatttaaaattgatttttgcatgtggcatgatgcaccagttcattgaggtaggggttgaagttatttcccatttttttcaataccatttattaaaaatattttcctctttctgttgaatttgcttggtgcctttgttgaaagtcatttcactgatatatgtagttctatttctatattcttgatcatgtttcatttgtctattcttttactaatagcacactgtctcaattattgtagctttatagtaagtcttgctacaaagtcttactacaggacaaagcttgtaggatttttgaatgggatggcattgcatctatacctttatcagggaaagagggaaggagggaggaggatcatcttaacaatattgacacttcaaatccatgaacatggtatatatttccatttaattaggtctttaatttctctcagctatgttgtatagttttcagtgtagagaggtcatgtatatttctcattaaattgtccctacatatttgatgttttctaatgttattgtaaatagtatttttaaaattgtatcttctaattgttcatttctagtttacagaaaaatgaaaaactatgtttttatgtattctatatgcttttgaaaagtaagaggtgcaaagtgctctattcttacactatattgtgtgagaatataagtcgaaaccactctgcataagttcaggcttccattctcttcagtttgtaggttgagagaacccatccagaaacagtaaacattggtgtctgcccaagtctggtcctgggtggttcattcattcatttacataacaaatatttattaactgtctgctatatgcaaggcactgacctatggactaaggatgcagcaatgaacaaggcatatatgattcctgagttaatgggccctattctaatacatgatattttacaggtctgataaaagccaacaaggagaaatacaaaagcactaagagaaagcttatagtagggaagcttcgcctaatctgaaggtcaaggaaggctttctttttttcggaaagtgatatttagagagatgaatagattaataggatgagtagaagttatctaggtaacaaggaaagtaaaaaagaaattgtcaggcagaggaaatagcatgtgtaaagatctttttaaaaaataaaaggtgtgactcaagcaatttaaaagggctagggaggctagaaacagaaaataaatagatgaaactaataaggcagggagagccttgtaaatcacacttaaaattctggattttgttctaaatacccttgtacttaggagctattaaaatattttaaacaaggcagtgacaagatatttgaattattaagcttactctggctgctatatggagaattgatttatgagggttataaatagaaataggaagataagataggagactatggcaatattcctggtaagaaatggaagaagagctggcttggattaaaggggaggcagtggatgtagaaataaatggatgaattatagatatatttaggaaatgggttcaataagacttaataatggaataggtggaatataaatttcatgagggcagggggtgttttgtttattattatattcctaggtgtctgaaaatattgttgtgttgcctggcaagtggtagatcttcagtgaaatattattaactgaataaatacaatggataaatggggagcagggattaagagtgattcctgggtttccacattaaggaactggatggacaaagctaccatttgatgagaatggaagactaaagaatgatagatttaagagaaatcgagttgagttccagccatgttcatttgaaggatctgagaaacagtgcagatattcagtgtgtgattagacatatggtcatcattcttttttttttttgagatggagtctcgctctgtcacccaggctggagtgcagtggccctatctctgctcactgcaatctctgcctcccaggttcaagtgattcttctgcctcagcctcctgagtagctgggactacaggcgtgcaccaccacgcctggctaatttttgtatttttagtacaagacagcatttcaccatattggccaggctggtctcgaactctgatctgcccgcctcggcctcccaaagtgtggggattacaggcgtgagccaccgcgcccagccggttaccattcttttactctgagttcttccattgtgatcatctagtcagatgggtagatccttataaggctgagcataataagcttcctgatagctctacactggtatgttttggggttcatggctgagctacttttgtgttttatttatcttcctgatctctttttcactgtaagaaacatccagcacccagggaaatttgctgtctaattcatactccactcttcagactagtcctagtgttcagttttgttttgttttttttctgtgtctggaattctattaaaatgtgtcaggctgttttaatttttgttgtttaattttctttcacatgattatatgtgctccatggatttttttgtttgtttgttttttgtttttgtttttgtttaagcggggtcttgctcttgtcgcgcaggctggagtgcaatggcttgatctcggctcactgcaacctccgcctcccgggttcaagtgattcttctgtctcagcctcccaagtagctgggactacaggcacatgccaccacacccggctaatttttgtatttttagtagagacgggtttcatcatattggtcaggctggtctcaaactcctgaccctggtgatctgcccacctcggcctcccaaagtgctgggattacaggcgtgagccaccgcacccggaggaaatttttaacctcagtttttcttcaccatctgtaaaactgcatagaaggaatgtttaggataaaagatgcataacaatcataacaaaattgttgggttttaatgttatgagtacacttggaggattctatgtccacacataccttaaacatcctatagagtccttagcattttaaagttgaaaccaacagtatgaatgatggtagaattttcccccccaggaagttagaactgttccatatcttgatagagggatgggttataaggatgtacacattttccaaaactcattgaacttaagagtcttgcatgtgactgtatataaattatactttaattgaaaataaatttaagaaaataaaattggctgggcgtggtggctcacgcctgtaatcccagtgctttgggaggccgaggtgggtgaatcatctgaggtcaggagttcgagaccagcctggccaacatggtgaaactctgtctccactaaaaatacaaaaattagctgggcatggtggcggacacctataatcccagctactcgggaggctgaggcatgagaatcgcttgaacccaggaggtggaggttgcagtgagccaagatcatgccattgctctccagcctgggcaacatgaacgaaatgccatcttaaaaaaaaaaaattaaaagaaaagaaaattagcctcccccaccctcactatacctcagactcacccctgaaagatcactactattcatccctggttatgtacacttacaaacattttctgtgtgtatgcgaatgtatgtgtggggttttctttgcacaacaggatcattttacagtatatatactgttgtgcaacttgctctttccacttaatatctcaaggaatcttttctttgaatctttatagccatgtacctcaatcttagtagttttctttattttatttttgaataggaaatacatttacatggttttaaaaatcaaaacaatatactatgtatatattgagaagtctgacttccatccctatcctactcctattccacccttgcttcctcctgtcccctgtaggtaaacattttataactttattaagcatcctgtcagcatttcttatgcaaatatgtacatatatttttatttccccattttttttacaaaaagataaaatactatacaccactttatatcttcctttcttcacattatatcctttaaaaatatttccatattggccgggcgcggtggctcacgcctgtaatcgcagcactttgggaggccgaggcgggaggatcacgaggtcaggagatcgagaccatcctggctaacacggtgaaaccccgtctgtactaaaaatacaaaaaaaaaaattagccaggcgtgatggcgggcgcctgtagtcccagctactctggaggctgaggcaggagaatggcgtgaacctgggaggcggagcttgcagtgagccgagatcgtgccactgcactccagcctgggcgacagagcaagactgcaactcaaaaaaacaaacaaacaaacaaaaaagaacttccatattaatatatagaaagctgttttttttaacagttgcttagcattcctttggattattaaccagtctcataaatgagcgctattgaatagccctgtacctacatcagtttttacatatgcagtatatctttgggatgaattcccagaaatggaattgaaattgctgggtcaaagaggaaataggtgtaattttcttaggtattttcacaagaagtgttaattctaactttctgttttgaaatgatttcaaattttcaaaggagttgcaagaattgtacaaagaactgtatctccttcacccggatgcaccgggtgaattatatgtattatataattgtatctgtaggccaggtgcagtggctcactcctgtaatcccagcactttgggaggctgaggcaggtggattacttgaggccaggagttcaagaccagcctggccaacatgataaaactccatctctactaaaaatacaaaaattagccaggcctggtaccccatgcctaagggtgaggcatgagaaatgcttgaacctgggaggcggaggttgcagtgagccgagatcgcaccactgcactccagcctgggcgacagagcaagactctgtctcaaaaaaaaaaaaaaaaaaagtaaaaaagttttttaaaaagatgtatctatatatacatatttacatacacacccaagtgtgtatgtatatatgtttgtgtgtatgtacacaaacacattatttttatatgatatgatttttttatgacatgattatttttatgacatttgagagtaagttgtagaaattatgtttctttattcctaaatacctcattgtgtatttcctaacaaggacattcttttatataattaaattttaataataaaaatcagaaaatttaacatcaatgcaatataattatttagcctatagtccatatttaaattctaccataccttatagtatattttactatacctcatagtaattttttttagtccaaaatatcacacattgcatttagttgccatgtctcttttttttttttttttttgagacagggtctcactctttcgcccaggctggaatgcagtggtatgatcttggctcactgcaacctccgcctcccaggttcaaatgattctcctgccttagcctcctgagtagctgggactacaggcatgtgccaccacactcccaccacacccagctaatttttgtatttttagtagagacaaggtttcactatgttggccaggctagtcttgaactcctgacctcaagtgatctgcccacctcagctaagtgctgggattacaggcgtgagccaccatgtgtggcctagttgccatgtctctttaatctactttaatctgaaacagttcctcagccttgtttgtttatatgaaactgacatttgtaaagactagaagccatttgtcttgtataatgcctttaatttatatttgttttatgtttcctcgtgattttatatatagagtttgtttgtttgtttgtctgtttgtttgttttgagatggagtctcattcttgtcacccaggctggaatgcagtggcgcagtctcggctcactgcaacttctgcctcccaggttcaagcaattctcctgcctcagcctcctgagtagctgggattacagatgcctgccaccatgcctggctaatttttgtacttttagtagaaacggggttttgccatgttgcccaggatggtctccaactcctgacctcaggtgatccgcccgccttggcctcccaaagtgccgggattacaggcatgagccaccgtgcccggacctcatgattgtatttatttatttatttaatattattattattatttttttttttttgagatggggtcttgctctgtcacccaggctggtgtgcagtggtgcgatatcggctcactgcaaccgctgcctcccagattcaagcaattctcctacctcagcctcccaagtagctgggattacaggcatgtgccaccacacccggctaatttttttgtattttttttagtagagacgaggtttcaccatattggccaggctggtctcgaactcctgaccttgtgatccacccaccttgacctcccaaagtgttgggattacaggcgtgagccaccacacccagccttatgattgtatttagactagacatttttttggtagtatattatttagccattgctgtgtaacaaattatcccaaaacttagtggcttaaaagaagcatttattatctcataaattttgtggatcaggactgggtatagctttgctgagtgcctctgcctcaaagtcttacaaggcagcaattaaagtgtcacctaaggctattgtcttatctgaagggtcaacagaggatggatccgcttctaatctctctcacatagttaatggcaaaattaagttccttgtggattgttagactaagggttccagttccttgctggttgttagcttgaggtctacctcagttccttgccatgtggacctccatagggcaaccagcttctgttagagcaagtaaaggagagtgccagagagggcaaatgtgatgaaagccacaatctttttataaacctaattttgaaagtgacatacaaggctaggcatggtggctcaaacctgtaattccagcactctgagaggccaaggagggtggactgcttgagcccaggagttcaagaccagcctgggtaacatgacaaaaccctgcctctactaaaaatacaaaaattagctggtctggtggtgcatgcctatagtcccagctactcaggaggctgaggccagagaattgcttgaacccaggaggcggaggttacagtgagccgagatcacaccactccactccagcctaggccacagaatgaaaccctgtcaagaaagaaaggaaggaacaagggagggagggaggaaggaagggaggtagggaggcagggaaagaccgagaaagtgacataccatcatttttgctgtagtttgttcattagaagcaaaatcacttggtccagcccacactctggggagatgattttctaactccatttgtaataacttattctacttttattagttggcattatacagtaagaaagagctttcttttctcttcttatttattcatatatggctcatgtgttttttccaatgagttatattctattactaacattttttattttgacctcaaattgttttagatgttaccaataagaacctcttcaagctggttcttgtgtccttttgccataactctctcattttcttgaaccctttcttactttctgatataagaaaatattagagactcatactttccttgttccagttctgagatgaaccatttatccaaaagccttgcttcattttagtagggaatagtatttagaaactaagatctgggtgtgaggtatgctcactgctaatgggctgtcactgtttctaggccttgtcagcagacggagctaggaaaaacacacataaacacacccatatttatatttgtacacacactccctcaaaatcgtgagttcatattgatacctccagttctggttcttcctagccttccccctttccatctttgtatttttattttccaacagtaagaaccctggctcccagtgctatgaatatatttactcatttgctccatccactgcactccagcctaggccacagaatgaaaccctgtcaagaaagaaaggaaggaatgagggagggagggagagaggaagagagagaaggaagaaggaagggagggagggaaaactgagaaagtaacataccatcatttttgctgtagtttgttcataagaagcaaaatcacttggtccagcccacactctggggagatgattttctaactccatttgtaataatttattccacttttattagttggcattatacagtaagaaagagctgctgaagatttgcttgcaattggttgtctttaaactgagggtatattgtcaaagtactgtgctgaaaagttacctgtagtatagttatgtgattcattaaaataaagtttgtttctattatgtgcagttttagagttttgccacactctggttgattagtatattttctgttgcttttttgttttgttttgttttgttttgtttttgagatagggtctcgctatgtcacccaggctggagtccagtggtacaatcacagctcactgcagcctcaacctcgtgcacttaagcgatcctcccacctcagcctcccaaatagctggggctgcaagtgcacaccaccatgactggctaattttttaattatttatttatttatttatttattttagagatggggtctcactatgtttccccaggctgaccctgaactcctggggtcaagtgatcctcctgccttagcctccaagtgctggtattacaggcataagccaccacacctagcctagtattcttttttgaatatgtaaaacattaacataaagtcaaaactattaaaaaaaggtgtactcagaaaattgtcattcctcccctataccttctgcctcattcacaccacactctgtagataatcgatttcattagtttgtggtttatcctcactgtgtttctttttgcaaaacgcaaaaacaaaacctatacatatttatattttcttatgtcctcttctttcttacacaaaaggtaacacactatgtaggtagtcctggctttgaacagtttcactataaaaatatttgttactacagcttaaataacataagtctcctaaaaataattcaaattttagttaccatggtatattaactttgagtagttccataaaggacaaacttggctgctagcccttcagtccacagagcactttgaaaataacagatgagcaaaataatgtggccaatcacatgacttctttcaaagtatgtcagtgatcagtcactgtgtgcctataatttagttcatgcacagacagcaaagcatgtagttgtgttgccttccagtgataaacccacataacattttagaaaaatgtattaagaattggccagcaaagataaaagtgcagcaaagaaacaaaagtgataatgttttcagtgaaatttgaattgaacataaatggagttatagaagaaatagctgaccatgggaatgttcacactgctactttcaagaatctctagaagggcagctaaaggagcttagtgaaggtgaatttattgacatgaatgagaaaagtaattgtgatgaaaaggatgaagatgtcccagagaaagtaatgccagcaaaaacttcacattaaaggaactctcagatatttcaaagcattgaaacctccaagaataaataaaatgttggaagttgatccaaacttagaaaggagtatggcaacttgtcaagatgaagaaaaggtgcttattcctttttatttatttatttagagacagagtttcactcttgttgcccaggctggagtgcaatggcatgatctcagctcaccgcaacctccacctcctggattcaggcagttctcctgcctcagcctcccaagtagctgagattacaggcatgtgccaccacgcccggctaattttgtatttttagtagagacagggtttctccatgttggtcaggctggtctcgaacccccaacctcaggtgatctgcccacctcggcctcccaaaacactgggattacaggcatgagccaccatgctccacctgcttattccatattatatgttataggatgaaaagaggccaaactaatcttgacatgttttttacaaggaaataatcctccatggttctaatttttttttttttttttttttttttttttgagacagagtcgcgctctgtcacccaggctggagtgcagtggcacgatcttggctcactgctagcaccgcctcccgggttcacgccattctcctgcctcagcctcccgagtagctgggactacaggcgccggccaccacgcctggctaattttttaaaaaatatttttagtagagacggggtttcaccgtgttagccaggatggtctcgatctcctgacctcgtgatccgcccgcctcggcctcccaaagtgctgggattacaggcttgagccactgcgcccggtgggtctaatgttttaaattacactgtgttaaataaatattagtttgttggttttttttttagtttttttatttctctacaaatttacaaccaataagagtttttaatgctttgacaaaaaatgttaaaggtcatagtacaatcgcatttcttcccattgattattaacatcactttacatagtttcatcttgcattagcaattttgtgtgtgtgtttgtggttttaaggagcggagagtttaataggcaagaaggaagggagaagacagaaggaaggagctcccccttacagagacagagggagcggggctccaaaagaggaggtccccatctaccgcggataccagccaggtatatatgcagaggctggtggaggtgatgtctgatttgcatagggctcaggggattggtttgaccaggcatatcattcacgtagcccgagaaaaagctggccctcccaccccagccttttaatatgcaaacgtagggcgccatggatgttctaaacacgtggagatatgtggggggcagccatgtggccaggaacttgtggggcaagggcaagaaggctgtgggaatcgccaagttgaatggacctagtttctaatggcctgcatttgcatatcaaaggttgctggcctggctcctagagccggggctttaaaagaaacttttccggagatgctttaaaaaatgaaaacttcccaaggaccccttttcctgtctatctgcataaaataatttcttttattatttatttatttatttatttatttatttatttatttatttatttatttattttgagacggagtctcgctctgtcgcccaggctggagtgcagtggcgcgatctcagctcactgcaagctccgcctctcgggttcatgccattctcctgcctcagcctcccgagtagctgggactacaggcgcccaccaccacgtccggctaattttttgtattttcagtagagacgggatttcaccgtgttagccaggatggtctccatctcctgacctcctgatccgcccgcctcggcctcctaaagtgctgggattacagaataatttcttaataactcctaccacattcctccctgtggcgatatcaaactaactgctgttaggaggctttgggcgaccattgcttctggctacttcctgctgaaaaggggcgtctaatggagaacagcagctagggctcctcctggggttgatctaagggtcctcggaagaatggcgtccatgtgtggttcagtttacagcaccgtttggagtttgattgcttctaggcgagaagaaacaattcaagttatagtattgagtatacagagtccaaatatcaatacaagacatataagcaagagagtgcttaataaaggggttaaccaattccataaagaagactggaagtaattaaagagggattgtagccactcggggctgaagcccacattttccctgagcctgtcaataattttgatttgatttttaagtccctgtagatttgcctcttctttactacaggtgttaatcccaaagaagcatgtttcatttaaaaatgcattactggccaggcgtggtggctcgcgcctgtaatcccagcactttgggaggctgaggcgggagcatcatgaggtcaggagtttgagaccagcctggcctacatggcaaaaccccatctctactaaaaatacaaaaaattagccatcgtggtagtgggcgcctgtaatcccagctaattgggaggctgaggcaggagaatcgcttgaacccgggaggcagaggttgcagtgagccgagatcgcaccactgcactccagcctgggcaacagagcaaaactccatctcaaaacaaaacaaacaaacaaacaaacaaaaactgcattactaaatccaataaaaagtcctagtagactcagtgatagtaaaactttcatgcttcctttttgccagtaactattatccctgctataaggatactaattaagcaaaatacgacagcaatggaaactctgtccaatatttcagttagaaggtgctaccatggataaccctattgcaaatagtagagtgaggaaagcagttcccacaaatgtggtgtggtaggtaatttccatctaaaattttacttgccaacatatagaattcccctctgtgggcctacgaagttccttggttttattttcccaaacaaagaaacctccgggttacaggtaccttacttactttcattacctggcacaatttgcaaaataattgcccagaactagcatattgattcacattttcacattacccatccctttttcccccccaccaagctgcagaagatcaccacttgattcacaggaataagcagggccagggttagtctaaaatgtaggcaaaaagcttaaaaacaattaatgagactagggtttaatgacaaatgtatgataagctttggagcaaaatttttctctccagtcctcatttttggtaaaaactaattatgaatgaactttaatcttatacttggcctgattatttgcatgaagtgcagcaagaatggttatttctacataggacttttggattggctttgatgaaacactgttccacaaggaatttcagattagacttttaaagctgagcccagacatgggtttgtatcctctaatacctgtgagttgggttatcctctcctcttgaggtcccaagataaactcagagcttccagacctgttagaaagtgacattcttcactgaccacaggttaggaaccctgtgtggggactgtgtagacaaggtgtgaggccagttctccccaaggggcttttattggctctgcatgtcaagcttgattccttaaagggaaacacaccctttcagttaaagccttggcaaaataaccggtttttccaattgtgttctgttgacaaagaaaaatggattcttgctgcactgatgcgaacaactatattgccgtaagttaagagtacttacagatagtctccaaattttagaggaaccaggcagagaaaaatgaacatgctccaaattttgttcacagtagtataccttacttgattattaaaggccataaatagtttaaaataagtttcctttcccagtccatgcaccaaaatgatacggctctgatgagtggaggaacaacagggttcctggtcctcatgctggtttagataaaatgacacagacacatgtggagtggttttaaggagtggagagtttaataagcaagaaggaagggagaagagagaaggaagacgctcccccttgcagagacggagcgggggttccaaagctgaaagaggaggtcccccacattaacaatttttaaaataccgtacaactgcagaaaatgaggactgcctgtacatactgtttgacactttgtttttttttttaacttatcaactttattttgtttgtttgttttggttttgggtttttgtttgtttgtttgttttggagacgagtctcactctgtcagccaggctggagtgcagtggcacaatcccagctcactgcaacctccacctctcgggttcaagcaattctactgcctcagcctcccgagtagctgggattacaggtattcgccaccacatccagctattggttttggtttttgagacagggtcttgctgtgtcacacaggctggagtgcagtggtgtgatctcagctcactgcaacctctgcctcccaggctcaagtgatcctcccacctcagccttccaagtagctgggactacaggcatgcacaccatgcgcagctaattttttctattttttgtggagacggggtctcactatgttgcttaggttggtcacaaattcacagcctcaagcagtcctcctgcctcaccctcccaaagtgctgggattacaggcatgagccaccacatccagccttaccagctatattgaagtataatttatataacataaaatttgccttttaaaattatacagtgcaatgcattttgacaattgtttacatctgtgtaaccaccatgcaatcaaaatatagaacatttctataaccttcaaaagttccctcatgcccctttgcaatcaattcactacttctccagctccaggcaacaactggtctgcttcctgtcactataaattagtgttgcctctttcagaatttcatctaaatggaatcctataacatatactattttgtatccatcttcttttactccaaagttcttgaaattcattcatgttcctgtgtgtatcagcagcgtgttccatttgattgttgagcagtattgcattgtgtggatatatcacaatgtgttcattcattcaactgttggtggacatttgagttgtgtccagtttagtgctattctgaattaaagtgatgtgaacaatcatgtacaagtatttttgtaggcatattttttttatttctcttggataaataccccaaaacagaattgttttgggggtcatatgaaatgggaagtatatgcttaactttataagaagctgccaaactatttttcaaaatggtaatatcactttacattttcatgagcaatgcataaagcgttccgcttgctacattttctcaccaatgcttcctattgtcaattttttaaattttagcaattctagtgggtgtgtgatactatctcattgaagtttcaactgtttttccctgttgactagagacactgagcaacttttcatgtgttgtctatttgtatatcttcttgaagcattcgttcatctttaactgagctgaacgccttcttaaaattgagctatgggagttttaaaatatatccttgtagctgggcgtgatggcaggtgcctgtaatcccagctactcaggaggctgagacaggagaatcgcttgaacccaggaggcggaggttgcagtgagccgagactgcaccactgcactccagcctgggcaacagagtgagacttcatctaaaaaataataattatacatgtaattatatatgatttttatatatgtaatatatatattcttgatgtgagctctttgtcacatacatattttgtggatattttatcccagactatgacttgtcttttcattttcttagttgtgtcttttgaagagcagaagatgtaattttgataaagcccaatttattttttcttttatagtttgtatttcttatgtcctattcaaaaactccttgcctactgaaaacttatgatgattttctcctatattttcttttagaagttttatagttttaccatttataatttggtctatgaatccttttgagttgatgtttatgtatggtgtatggtgtgaggtaacaatgaagattcatatttttttccaaaggaatatccaattgtctctttggaaaaatatgctgagaaggctatcttttccccaccaaataatcttagcaccttaatcaaaaatcatttggccatggacatatgtaggtgtgggttttttctgggctctctgtgttagatggatagatagacagatacagatatataactgtgtttacacatatgtaactgtaaacacagttatatatctatatatccaccaacagttgaatgagaataaactattgttataagcatatatacacattgtatatatatgtgtacatatacatattgcatatgtatgtatacatatatacacacaaagtatatatatgtatgtatacatatatacacacttaaagtaatggcctccagttcgatccaagttgctgcaaaggacattatttcatgccttttcgtggctgagtaatattccatggtgtatatatatatatgtgtgtgtgtatatatatgtattatgtatatatatatgtgtgtgtgtgtgtgtgtgtgtatatatatatatgtgtatatatatataccacattttctttatccactcattagtcgatggggacttaggttggtttcacatttttgcaattgtgaattgtgctgctataaacatatgtgtccaagtgtctttttcatataattacttattttcctttgggtagatacccaatagtgggattgctggattgaatggtagatctgttttttgctctttagagaatctccatactgttttccatagaggttgtactaatttatattcccagcagcaatgtgtaagtgttctcttttccccacatccacaccaacatctattgttttttgactttttaataatggccattcttgcaggaccaaggtggtagctcgttgtggttttaatttgcattttcctgatgattagcgatgttgagcattttttcatatgtttgtgggccatttgtataccttcttttgagaaatggctatttgtgtcctttgcctactttttaatgggattgtgttttatttttcttggtgatttgttagttccttgtagattctggatactagtcctttgtcagatgtgtactttgcaaagataatattttggatgttatatttccattataatttagttcaaagtattttctaatacaccttgcaatttcttctttgacccatggattattttaaagtttgttattttgtttgtttattttgagacagagtttcactttttttgcccaggctggagtgcagtggcacaatcccggctcccagattcaagcgattctcctgcctcagcctcccaagtagctgggattacaggtgcccaccaccacacccagctaatttttttttcttttttttttgagacagagttttgctcttgttgcccaggctggagtgcaatggcacgatctcggctcactgcaacctctgcctcctgggttccagcaattctcctgcctcaacctcctgagtagctgggattccaggcatatgccaccacgccaggctaattttgtatttttaatagagacggggtttcttcatgttggtcaggcgggtcttgaactcccgacctcaggtgatctgcccgccttggcctcccaaaatgctgggattacaggcatgagccactgcacccagtccaattttttgtatttttagtagagatggggtttcatcatgttggccaggctggtcttgaactcctgacctcaggtgatccgcctgcctcggcctcccaaagtgcagggattacaggtatgagccaccatgaccagcctaaagtgtattgtttagtcaccaaatatgtaagtattacccaaatatatttgtcactgatttctaatttaattgtattgtgatccaaaaatatacattgtatagtttctattcttttaaattcgttaacatttcttttatggcacagaatatggtctatcttggtgagtgttgcttacacacaactgtgtaactgaaaactgtgtattctgcttctcgtggttgttgtatcctataattgtcaactagatcaagttagtaagagtgttgttcagtgatcttttcttcttcagtgtttactgtatttgctaatcccatccagtgaagtttccatttcatatattgtatttttcacttttagaagttccatttgactctttcatttccatcctcaattatcttcatatttttctttaaatttttgagcacatttataatggaggttttaaagtccttgtctgctaattttgtcacctctgtaattcctatgatgattttcttcctggcttggggtcataatttgttgcttatttgcatgtctaataatgtttttattggacagcagacattgtaaatgttatatttttgagtgtttggattttgtctttctttaagaactattgcagtttgttttggaaggctattatgttttttgcagatcaggttgatcttttcaaggcttgtttttaagctttgttaggacaggtctgtagtaacttttgccttgggctaatttagacctaccacttaattctgacttttttgattaatctgagtgttcagcagggtctctttattatggctaaatgaaattcaaacattttccagccctatgtgaccatcaagaattcagctaatagctccctggcagttcttcgcccagctgcagaaaagtgtcagtgcactctatgtatgctcagattattatttagccaaagacttggggatccatattaatattcctggagttctttgtgtagctccattctctttagtactctatcccataaattctggctgcctcaatctcctaatctccccaaactctaatatctattcctcaactcagcaaaaccatggtgttattcttggatttcccctttcctgccccacagtctgaaagttgtctccaggcaaaaaaaatggagatcctagtttgcggatcctcatttccttctccttttttttttttttttttttttttttttgagatggagtctcgctctgtcacccaggctggagtgacgtggcgtgatctcggcttactagaaactccggctcccgggttcatgccattctcctgcctcagcctcccgagtagctgggactacaggtgcctgccaccatgcccggctaattttttgtattttgtttagtagagacggggtttcaccgtgttagccaggatggtctggatgacctcgtgatctgctcacctcggcctccaaaagtgctgggattacaggcatgagccaccgcgcccggcctgcttctcttctcttatgggttagaatcctgcactgtcttttgaacaaatgtctaaaagcttttatcacacattttgatccacttcccagttgttatagtggtatatctggtttcacatgactgaaaggaaaagttttcaccttgctttttgtactaataatatatcctggaaatcattctatataaatttatagaaatcttcatttttaaaatagcttcataaaactccattgtaaaaaccaggtgcagtggctcatgcttgtaatcccacactttgggaggccaaggcgggtggatcacctgaggtcaggagttcaaggccagcctggccaacatggtgaaactccgtctctactaaaaatacaaaaattagctgggtgtggtggtgggcgcctgtagtcccagctacttggaaggctgaggcaggagaattgcttgatttcaggaggcggagattgcagtgagctgagattgcgccactgcactccagcctgggctacagagcgagactccgtctaaaaaaaaaaaaaagcaaaaaaaaaaactccattgtatgtgcacatatcattatctgttcaacccatctatgacttgtcatttaggtagtttccatccaatatttttgcaatataaaaaatgctaatgaagaacctgagatatatatatatctatatatatagatatatatgtttgttgttgttgttgttatttttgaagtatgtacgtataataaattcctaatagtgtgattgctgcatcataaggtaaaggcatatgtagttttgttaaatatagctattccccatcttgcattcctacaaatagatgagaatgtccattgtcccatagtctcctttgcagagtatattgtcaagctttttaattgttgccaacctgatgggtaaaaagatatctccaaataattttaattaaaatttctcttattatgaatgaggttaaatagtttttcatatgtttaaaagccagtttatatctttttgtttttttagagacaggaatcttgttctgttgcccaggccaaattgcagtgatgcagtcatagctcactgtagcctcgcactcctgggctcaagcaatcctcctaccttagcctcccaagtagctaggactacagatggatgccaccatgtccagctaatttttttatttttttgtagagatgtgaggtctcactatgttgcccaggcttgtcttgaactactggcttcaagtgatcctcccacctcagcctcccaaagtgctaagattacagccatgaaccaccacaaatgaccctatatatttttttgaattgtctgttcatgtcttattttcatttttctagtagttttttttttaagtgttttagcctaaatttgtaaaaagtttaggggatatatgaagggactctaaatgtttatgaagaaatttaattaaaagataaaaataaaaatataagctttatttttcaacatgagctccatcaagttcaaggcacttttgtaagcaatgatactagccatttagttcacccctaaagaactgagagtcctgggaatttagccatgtcaatgcagtattttttatattggttactgaagaaaaaatgggtgccctttaaagttgtaagattaggaacaaaaacaagtcagaagaagccaaatcagcactgaaaggtgggcacttaatgattacccaagaaaactctcaccaaattgcccttgcttcatgagaggaatgagcgggagcattgtcgtggtcaggaaggattctggggaagttttcccaggcattttttctgctgaagctttggtaactttctcaaaacactctcataataatcagatcttatcactctttggccctccaggaagtcaaccagcaaaatgctttgaacatcccaaaaaagcgcttgccatgacatttgctcttgaccagtctgcttttgcattggtcaaatgccaccacttccacctcttgtgctttgttttcaggatcagactggtaaagtcatgtttcatctcttgttacagtttttttttttttaagaaacccttcaggatcttgatcacatttgtttaaaatttcaactgaggctgggcccagtggctcatgcctgtaatcccagcactttgggaggccgaggcgggcaaatcacgaggtcaggatttcgagtccatcctggctaacatggtgaaaccccatctctactaaaaatacaaaaaattagccgggcatggtggcaggcacctgtagtcccagctactcgggagggtgaggcaggagaacggcatgaacccaggagacggagcttgcagtgagctgatatcatgccactgcactccagcctgggcaacagagtgagactccagctcaaaaaaaaaatcaagtgaaaactctggtcttaaactgcagctgatctattttatttttattttttttcagacacagccttgctctgttacccaggctggagtgcagtggcaccatcatggctcaatgcagccttggcctcgtgagctcaagcaatcttcccacctcaggctcccaagtagctgggactacaggcacatgctaccatgcctggataatttttttgcagctaatctagatgtaatggttttggcacccatctaatggaaagtttgctcaactttaatttttcagtcagaattgtgtaagctgaaccgagatgtctatggtgttggctattgtttctgctgttaattgtaggtcttctttaattagagcacagacaagatcattttttttcctcccaaattgatgtagatggtcttttgctgtgggcttcatcttcaacattgtctcatcccttcttaaaacaagctagctacttgtaaactgccgttttctttggagcattgtctccataaacttttcacaaaacatcagtgatttcaccgttcttccactcaagcttcatcataaatttgatgtctgttcttgtttccattttagcagaattcatgttactctgataggggctcttttcaaactgttatcttattcttcttagtgcctcaaactagatcctattcagacatggtataacaagttagtatgggtttattttggtgcaagaaatattttgaaatccacacatttttttcataatatgcattttccatgaagtttttgaaaactccttgtattaggaatattagtcctttgtccagtaaacagactgcaaatattttctcacagctcatcatttaccttttggcatttttttgcaatgcaatttttttccctttgtttttgttttttgtgtaatgaatcaatgttttcttttttttttttttttagaccaagtctcactctgtcacacaggctggagtacaatggtgcaatctcagctcactgcaacctctgcctcccaggttcaagtgattctcatctctcagcctcccaagtagctgggattacaggcacatgccaccatgcctggctaatttttgtatttttagtagagatggggtttcaccatgttggccaggctggtctcgaactcttgacctcaagtgatccactcacctcggcctcccacagtgctgggattagagacgtaagccactgcccccggccaaatcaacgttttcttatattgcatttaggttttaagtcatagttagaaagcctttccccacacctaggttatagaaacattcattacttttttcttccagtgctagtacttgcatggtttttggtttccacatttagatccctgatctaattggagtttattcttttgtgtgctgagatatggatctgattatatcttttttcccaaatggctatccagttgtcccaatgccatttattaagcacttcatctttgtcccagtgatttgagatagcatctttatcatgtaccaaacttctatagtgccagaagatttttattttttttagacagggtctggctctgttgcccaggctggagtgtagtggcacaatcccagctcgctgcaacctccgcctcacatgctcaagtgcccgcacctcagcctctcaagtagctgggactacaggcacatgccaccacaccaggctgatttttatatttttttgtagaatgagatttcaccatgttgcccaggctggtctcaaactcctgagctcaagaaatccgcccacctcagcctcccaaaatgctaggattacaagcatgagccaccacacccggctgccagaaaattttaatgatcagaaaaccacaattctttcttcctctgttatatgttgaagtaaaatacttcatttagaaaactaagccgggcacagtggctcacacctgtaatcccagcactttgggaggttgaggcaggcagatcacctgaggttaggagtttgagaccagcctggccaacatggtgaaaccctgtctctgctaaaaatagaaaaatttgctgggcatggtggcgggtgcctgtaattccagctacttgggaggatgaggtaggagaattgcctgaacctgggaggcagaggttgtggtgagccgagaccacgccattgcaccccagcctgggcaacaagagcaacggtaaactccatctcaaaaaaaaaaaaaaaaaaagaaagaaaaaagaaataactcagccatacaaggctacccatttggtgagaactaataataagttagatagcaaggtaatagcaaaatgtgggtgcaaaattaaagcaagttatttctgaggagaatgtaggtctcatggaagattttcatgtggacaaatttagtaaattttttgcaggtagtttcctgacatatttaacatttgtgatatagtaaacaataagaaggtactaaaggctgggcgcggtggctcacgcctgtaatcccagcactttgggaggccgaggtgggcggatcacaaggtcaggagatcaagaccatcctggctaacacggtgaaaccccgtctctactaaaaatataaaaagttagctgggcgtggtggcgggtgcctgtagtcccagctactcgggaggctgaggcaggagaatggcgtgaacccgggaggcggaacttgcagtgagccaagatcaagccactgcactccagcctgggcaacagagcgagactccatctcaaaaataataataataataataaggtactaatatgatccagactagaagagaatagcactaaaatgggagatggggtaaacctgtggttttttttaccttaggcttttgacttccaaaattattgtttttgctgggtgcggtgggtcactcctgtaatcccagcactttgggaggccaaggtgggaggattgcttgagcctaggagtttgagaccattctaggcaacaaagcaagaacctgtctctaaaaaaatttaaaaattagccagaaatggtggcacatgtctgtagtcccagctacttgggaggctgaggcaagaggattgcttgagccttttgaagttgaggcttcagtgagccatgatcaccccactgcactccagcttgggcaacagagcaagaccccatctcaaaaaataaaacaaaatagactgggcacgatggctcacgcctgtaatcccaccactttgggaggctgaggtggatggatcatgaggtaaagagatcgagaccatcctggccaacatggtgaaaccccgtttctactaaaaatataaaacttagctgggcgtggtggtgcacacctgtagtctcagctactcgggaggctgaggcaggagaatcgcttgaacccgggaggtggaggttgcagtgagccaagattgtgccactgcactccagcctggcgacagagtgagactctgtctctaaataaataaataaataaaacaaaataagtaaaataaaataaatgtttgtagttccaaaatattttgatgacataatttcttcttgttctaataaaactacatatgcattggtcctatgacctagtaatcacactattaggaatttatcataaatacacacctcaaaaattacaaaaatacatatataccagcttatttattacagcgttatttgtaattgcaaaaacattgtagatagaatggaggtcacataaaacttattcttaagattcagaccgggtgcaatggctcacgcctgtaatctcggcactttgggaagccgaggcaggcagaccacccgaggtcaggagtttgagaccagcctggccagcatggtgaaaccccatctgtaccaaaaatacaaaaattagctggtcgtcgtggcacgcctgtaatcccagctactcgggatgctgaggcgcgagaactgtttgaaccccggaggcagagactgtagtgatctgagatcatgccactacattccagtctgagcaacagagcaagacttcgtctcaaaaaaaaagatcatagatcatcttatcaaatcaaagtatgcaaaatattcaagtaaacttcagataaatatgaaggctaaaccattcagcttcttcaccaaacccttgaatgtcccacctgtctaaatggagatacatgtttgtttgatttattggttaactgtttttattccatttttcctcaaatgatcccataatttgaccttaggaagctgttcaaatagacacattaggttgaatggaaagactactcgatgatatttaggattttaagaggattttatgtattttttccttgtgtgcaataatttaatagcatcttgaataggattttctgatattactaaccctctgggaataatattaggtaattagacagttagctaatattaaaatatgtatcaggtaatatttattgagagtttcctctgtgccaagcaggatcaacttcataggcaggcgacctgtgcggggacacagggcttcatgcttagataggcccccttgctttgaaggcccctaccctttggttagggctctgctgttaccatcttgaaattcttaataatttttattttatttttttgagtcagggtcttgctctgtcgccctggctggagtgcagtggactcactacagtcttgaattcctgggctcaagcaatcctcccacttcagccttctgagtagttaggacgacaaacacacgccaccatgctcagataagttttttgtttgtttgtttttttgtttttgtttttgttttttgtagagatgggactgtccctatgttgctcaggctggtctcaaattcctggcctcaagtgatcctcccacctcagcctcccaaagtgctgggactacaggcatgagccactgtgcctggtcaatcatttttattaacaagcccaagccctcttttttttttttttttttttgagacagggtctccctctgttgtccaggctagagtgcagtggtgcgatcttaccttcactgcaacctctgcctcctgggttcaagtgattctcctggctcagcctccctagtagctggaattacaggcacccacccccatgcctggcaatttttttgtatttttagtagagatggggtttcaccatgttggcaaggctggtctcaaactcctgacctcaagtgatccacccaactcggcctcccaaagtgctgggattacaggtatgatccactgcgcccggcctccaagccccctatttttattttgcactgaccctacaagttacgtagctaggcttagttatgtttttagcaaggaaagtgtataatctcatgtaccttttgaaagattactcaggtctctgcatgtgaaatggaatttagggaatgcaagagagggagtaaaaataacagcgaggaagctatgatagcatttaaggttgctttgactcaggggtagcagtagatagggtaagtaattgatagtttcaaaatatattttgggagtagtaagcattggtatggattagtaatatactggatgtggggatgcagaaaaaaatattaaaaattacttctgaaattctggctggaatagaagtgccacttaccaggtaaggaaggttggagacataacatatttgagggtgtggtcaaaagatgagtttgacattatgctatgtcatataaaagacatataaaagactacctattttataattcctttttaataaaatattcagaaaaagcaaaactgtggttgcctgaggctgaagctaggaagattgactacagacaagcatgagggaaattttgggggtgatgagagttttctaaaactggattgtggggttggttgcattactgtataaatttattaaaaatccctgcatcgtataggggcactatattgtatgtagaaagctgtgaaaagattttaaaaatgattgacatgtctgtggttatatcaatgagtactattattattcccattttatacataaagaaaataaaagagaagttaaaaataaaagtttcatggttacatagctactaggtgtaatatccagtattggaatttgaatctttttgacactaagaccttactctcgatcatataatacattcactttctattttaaagttatattatagccgggcacagtggctcacacctgtaatcccagcactttgggaagccgaggcaggcagatcacgaggttgggagatcgagaccatcctggctaacacggtgaaaccccgtctccactaaaaatagaaaaaattagccaggcgtggtggcacgcacctgtatcccagctactagggaggctgaggcaggagaatcgcttgaacccagaaggcagagcttgcagtgagacgagatcgtgccactgcactccagcctgggtgacagagtgagacaccatctcaagaaaaaaaaaattatattataaatgctgcatctcattggtcagaagctctcttgaaattataaaacaaagaagaaaaaagataaagactgggaaattgtgttgaatcagtatataaatcctgtatactggtccttccatttcccctagaaataagtgatacaggccaggcgctgtggctcacacctgtaatcccagcactttgggaggcggaggctggcagatcacctgaggttgggagttcaagatcagcctgaccaacatggagaaacccccgtctctactaaaaatagaaaattagctgggcatggtggcacatgcctgtattcccagctactcgggaggctgaggcaggagaattgcttgaacccaagaggaggaggttgtggtgagccaagattatgccattgcactccagcctggggaacaagagtgaaactcaaaaaaaaaaaaaaaaagaaagaaaaagaaaaagaaagaaggaaggaaggaaggaaagaaagaaagaagtgatacaacaagttacagcatctttgtttattatccactgtgagttgtattaccacactttacttggctctttggcaaactatattatctcttcagatcactagggctaggaaggcccactggtaacttgaaggagtaaatgtatcttctaaaaaatgcttacttccagggagattggatccacacaagtgaatacatatatagtccttagtgtatgctatgattattttactatgtcagtagcataaagattgctatattaataagcattaagtgcctgctgtgctagacagtgaggatgcaagtggccaccaaaatagcatggtccctgccctcctggagcttctttttttcttcttcagtgggggaagcagatactttgcttatgcaaaaataattataaaatttaaagttgtgccaagttcaatggaaaaaatataaggtgttctgagagagcataacaaaggatcctggttttaactggggcctaatggaagacctctattaggaaataacatttaaactaagaccagacagacctgtagaaattagcaaagcaaagggagggaggaaaaagcagctttcctggcaaaggaacaatttgtgtgaaggccctgagacagggaagggctggggttctgaccaccctccaagtggtgcaatggaatatagtgagagagggagaagacatgagaacttggatactatgcaaaggatttggtattttaattcaagagcagtatgatgctactgaggagcagctggacaattgtgtgatccaattaaaattttaggaagatgaacctcgctattgtggagaatgcatacacaagggttctgttggttcatgaagaggtcttaagaaaactatgagctgggtgcagtagctcaggcctgtagtcccatctacttagaagtctgaggcgggaggatcccttgagcccaaggagctggaagttacagtgagctatgattattccactgtactccagcctggatgacagagcgagatcctgcctcagaaacaaaaaccaaaaaacaaacaacaacaaaaacaacaacaacgaaaatctcagaaaactacaggccttattatcaagaaaatgacaggccttattattgagaaaactacttacatttttaaaagctgattttcaaaaaccagattgtgaattaagtgatgctgaataggggaaaaaaagactgataaaccagtgtatctctgaataacccactagatcagtgcttgtcaaactttaatgtgttttcaaatcaccctgatgttttgttaaaatgtaagtcatgtctcagtaggtctagaggagggcatttctgcatttctaacaagctccccggtgatgcctagaccattggtcctcacactttgagtagcaagtgattgggctatactctttattctaaattctaaatgtattctatcttctaatgcctatcagccctcttgctggtctggctaattatcaaacttgagcatttaaaactgggggttttcagagattaattgaagtgttaaagacatggaaatataggtcacatatggcttttcatctcttccggaaatatcctatatatccttacttcttttctacctacctaacctatgtgcctaccccttcacttatgttcaaggttctattatacttcaaaaggactctatgcaatcaaagtgatgtccaagacaaatatacagaaatagtatgaggctctaacactttacatctaatggagtggtttgcatcattaattgaggcttactctgtgccaggcactttacctgccttcttcatttaataggataggagcaggaactcttagaggttcatttcttgttcaaggatatacatctcatctctggcttatatcacagtggactcttttattcactatcctaatcattataattttgtttggtgacaacaattctaaatgcagaaaagttaaggctctttattctgtgactaaaggctttgtattttctaaagatttgtggagctttgctgccattatttcaataattttataaagatcctaggtggtaaataggcctggctttttttctttttgaaatcttctccgtcttcttcttcattagcagtgcaacttcttgtggcatatggtacccaagatcttgggaaaaggattgatcaagtaaagggaaacgatagagagagtgtgctctacaactgagatcatgctccttgtgaaagacagggtagggaaatttcttattgctccctggttcttaagaaatgagagctaacaatgacatccagttttaaaagaaataaaatctgaattgtacttttaaattttataagccagagttaaaccaatagattgtaactcctgctaatttgatagtagctccagataatgaggaagtgacagggaatgctaatttcatttggtaagagataaaactgaaattattaatgtctccacggaaatgctaaatgcctccttacaagtagggtccggctaattgtctgtcttccaacaagccagatttgttggtgtttttccagacaatgttgtgtagttttcggtttggttcgatcccctttcttgtgatcaaagaaagtgattcaaatgtttaatgagtcttgatttggattggagacttgcagaacggctagcctcacagccccaaggctggctttccctaaggtaggtttcctatgcaccgatactggcaaggcgctttggctggaaactctggaaggaagccaaaggaaagtgaagttcctggcgctagcgcgtgtcctgctcagagagcccggcgctagctcattcttcgtgcagttattggctgggactctgtgtgccgctgtcggccaatgaagacgctggagatcgggcccctgcccgtcccctttctgcgccccgggatgaggcagagactgaacagccggcgagcaaatcaacggcatccagaaagccatgtcggactcggcgcccagcgcccaagcgctaacccgctgaaagtttctcagcgaaatctcagggacgatctggaccccgctgagaggaactgcttttgagtgagatggtcccagaggcctggaggagcggactggtaagcaccgggagggtagtgggagttttgcttctgcttggtgccttgaacaaggcttccacggtcattcactatgagatcccggaggaaagagagaagggtttcgctgtgggcaacgtggtcgcgaaccttggtttggatctcggtagcctctcagcccgcaggttccgggtggtgtctggagctagccgaagattctttgaggtgaaccgggagaccggagagatgtttgtgaacgaccgtctggatcgagaggagctgtgtgggacactgccctcttgcactgtaactctggagttggtagtggagaacccgctggagctgttcagcgtggaagtggtgatccaggacatcaacgacaacaatcctgctttccctacccaggaaatgaaattggagattagcgaggccgtggctccggggacgcgctttccgctcgagagcgcgcacgatcccgatgtgggaagcaactctttacaaacctatgagctgagccgaaatgaatactttgcgcttcgcgtgcagacgcgggaggacagcaccaagtacgcggagctggtgttggagcgcgccctggaccgagaacgggagcctagtctccagttagtgctgacggcgttggacggagggaccccagctctctccgccagcctgcctattcacatcaaggtgctggacgcgaatgacaatgcgcctgtcttcaaccagtccttgtaccgggcgcgcgtcctggaggatgcaccctccggcacgcgcgtggtacaagtccttgcaacggatctggatgaaggccccaacggtgaaattatttactccttcggcagccacaaccgcgccggcgtgcggcaactattcgccttagaccttgtaaccgggatgctgacaatcaagggtcggctggacttcgaggacaccaaactccatgagatttacatccaggccaaagacaagggcgccaatcccgaaggagcacattgcaaagtgttggtggaggttgtggatgtgaatgacaacgccccggagatcacagtcacctccgtgtacagcccagtacccgaggatgcccctctggggactgtcatcgctttgctcagtgtgactgacctggatgctggcgagaacgggctggtgacctgcgaagttccaccgggtctccctttcagccttacttcttccctcaagaattacttcactttgaaaaccagtgcagacctggatcgggagactgtgccagaatacaacctcagcatcaccgcccgagacgccggaaccccttccctctcagcccttacaatagtgcgtgttcaagtgtccgacatcaatgacaaccctccacaatcttctcaatcttcctacgacgtttacattgaagaaaacaacctccccggggctccaatactaaacctaagtgtctgggaccccgacgccccgcagaatgctcggctttctttctttctcttggagcaaggagctgaaaccgggctagtgggtcgctatttcacaataaatcgtgacaatggcatagtgtcatccttagtgcccctagactatgaggatcggcgggaatttgaattaacagctcatatcagcgatgggggcaccccggtcctagccaccaacatcagcgtgaacatatttgtcactgatcgcaatgacaatgccccccaggtcctatatcctcggccaggtgggagctcggtggagatgctgcctcgaggtacctcagctggccacctagtgtcacgggtggtaggctgggacgcggatgcagggcacaatgcctggctctcctacagtctcttgggatcccctaaccagagcctttttgccatagggctgcacactggtcaaatcagtactgcccgtccagtccaagacacagattcacccaggcagactctcacggtcttgatcaaagacaatggggagccttcgctctccaccactgctaccctcactgtgtcagtaaccgaggactctcctgaagcccgagccgagttcccctctggctctgccccccgggagcagaaaaaaaatctcaccttttatctacttctttctctaatcctggtttctgtggggtttgtggtcacagtgttcggagtaatcatattcaaagtttacaagtggaagcagtctagagacctataccgagccccggtgagctcactgtaccgaacaccagggccctccttgcacgcggacgccgtgcggggaggcctgatgtcgccgcacctttaccatcaggtgtatctcaccacggactcccgccgcagcgacccgctgctgaagaaacctggtgcagccagtccactggccagccgccagaacacgctgcggagctgtgatccggtgttctataggcaggtgttgggtgcagagagcgcccctcccggacaggtaaggtttagcaagtcatgcttgaccctgttagtgcttttttattcctacatcatattgaggaaggaatggagctgtttttttagtgatgaagatgttttcctggtgatgcattcacactttcaactggcccttcctagatcaaagttagtgcctttgtgagatggtggcctgccagagtgtggtttgtggtcccatttcagggggaagatacttgactcatctgtggacctaattcacatcctcagcactcttttgctatcacaactaaccaatcttgctaagggatggttaagctaaaacacaagatctcagcgatcagagtttagcttggtatcatttacattaggaataagctgctggatacctctaaccagtggcagcttctaggaatacaaaaactacctcattcctccacctttcaagtgattgtgacatttgtattaaaactaatagctttttgataattttcctttgtttatacagatcgtgtacctcattctcagataattttttatgaatgaaatgaaattccaggcatcctttaaattttatttcaagcattctactggaaatgatgtgcaccctgcttacaaaatatttttaccttataacagtaatgcatgtttgctagaaaattcagaaaatacagaaaagtatttaaaaaattaaaactataatctccaaacccaaagataaccatttttaattataaaagtaataatttatttcaaaaataaatctaggcaacccaagaaaacataaagtagccagactcagtggtgtgcacctgtagttcttgctgctcagtgcctgaggtgggaggattgcttgagcccaggagttctgggctgtggtgcactatgctgatcaattgatcaatccactgtctgcactaagttcagcatgaatacagtgacctcttgggagggcaggaccatcaggttgcctaaagaggggtgaactggcccaggttggaagtggagaaggtcaaaactgctgtgctatccagtagtgggatgacatctgtgaatagccactgcactccagcctaggcaatatagggaaaccatgtctctttaacaataacaacaacaacaacaacaatcccagaaactacaaaaggagagtctttttggtgcctccagtgttagtccctgtccttccagccttatttttcttaagtatatgcacaatgtgaaaggtagataaattcatatccttagacaggtaaagcattcattaattcagggtggtatgcaaggatactatccaaggcatggtatccatgcaaggtgactgcaaggcctttgccctggagagaaccctatacatactctcaactgtaggagaaacactgttattttgttactcagtgcatcattgctatcaactcttggatttggcagttagtcaaatgaggttctaccatttaccaactaggagtctgtggccaagttactcaatctcctttctaagcctcttcctcatatgcaaaaagggaataataagtgttttataagattcatgcatgatataatgtatgcaaagtgtttagcatggtgcctggcatatcataactgttaaacaattattagccagctcctagcattttgggaggctgaggcaggcggattgcttgaggccagcagttcaagaccagcctgagcgacatagtgagatcctgtctctacaaaaaaaaaaaaaaatgtgttttcattagctgggtgtgttggcatgcacctgtggtaccagctacttgggaggctgaagtgggagaattgcttgagcctgggaggttgaagctacagtcagctgtgattgcaccactacacttcaaccatggcaatagagtgagaccctgtctcaaaaaaaaaaattatcagctattactataattatttttattagttcctcactcacctaaaatctcaaacacaccttagaaatacacatatgagaacaaccaaaaatgacaaagtagaagcacatatgaaaaggctaagaaagcatgaaagccagcaagaaataactgccgctcttctggtcagcctggaaagcaactggcattttccctagaacaatgttttcaaacttggttgcacattaaaatcacctagagaccttttaaaaattctgaaacccaggccacaccccgacaaatgaaagcacagtctctgggggtgggacataggcatcattttttgaaggtccccacttgatcctaatgtgcagacaaatttgaaaaccacagctttgggaggctgaggtgggtggatcataagatcaggagtttgagaccagcctggccaatatggtgaaaccccgtctctactaaaaatgcaaacattagctgggcatggtggcgcatacctgtagtcccagctactctagaggctgaggcggaagcatcagtgagggagaatcagtgaacccaggatgtggaagtttcagtgagcccagatcacaccactgcactccagcctgggcgacagagcgagactccacctcaaaaacaaaaagaaagaaagaaaaaagaaaagcagtactctggaacctaccaatccatcatttagcatatttgtgaagtaaagtgttattctggtatttgcagaaccagaatccagctttattgggccaggcccaatttttttaaaaaacatggtaaggtctcccagccttaaagtattacatagcatagctctaaaagatcactgtaggaagacataaaatggtatttcagtcatctaagggaaaaaccttcctaaagcactagcccctggacaactattatttaaacatctacagctgttcaatagatattgggttctttttggagggatgtgacaaaattcttgtataattagattgtgatgatgattgtatcagtttagtacatgtaaatacactgaaaaccattggattatacactttaaatatgtgatttgcatggtatgtgaattatgtctcagtaaaaatctagagatggggctgggctcagtggctcacgcctgtaatcccagtacttagggaggctgaggccagcggatcacctgaggccaggagttcaagaccggcctggccaacatggtgaaacttcatctctactaataatacaaaaatcaggccgggcctggtggctcacgcctgtaatcccagcactttgggaggcggaggcgggcggatcacgaggtcaggagtccaagaccagcctggccaacatggtgaaaccccgtctctactaaaaatacaaaaattcaccaggcgtggtggctgaggcaggagaatcgcttgatggtggaggttgcagtgagccgagatcgcgccactgcactccagcctgggtgaaagagcgaaactccatctcaaaaaaaaaaaaaaaaaaaaaatcagccagatgtggtggcaggtgcctgtagtcacagctacttgggaggttgaagcaggagaatcgctttatctcaggaagcagaggttgcagtgagccaagatcatgctgttgcattccagcctgggcaacaagaacaaaactcactccatctcaaaaaaaaaaaaaaaatatctagagatgggagaatcatatggctggcataaaaaggtcaagtcaaagatatgtaagattaaggctttacgatgctccagttctagtaaaacagaccaggtacttgttttggtgtgaaattgccaatataagtatagtactgtacatattagttgtttagcttaggtaagtcttttaatctctttaaactccagtttcctcatctataaaataaagagaatatctactttgcaaacttgttgtgagagtgaaaagtaatgcatataaagtccctgtatggagcaagtactcaataactatttgttgaactaaaaatgataatactgatattcaccatttattagcatccctatgtgccagacactgtaaacaattaaaagttatcattctggtacccagagtacagtatgagacagacatgcaaaaaaaaaaaaaaaaaaagataatggagatctgcatagcataagatgcagtgggaccaaacgggaaaaaacacctaaatgagcctggagaaaggaagaaatgatagaggtggtgatgcttgagctatgatctaaaggttgagtagtagcttgtcagacagtaaaggggaaaggacagggcagggaggggccattgcaagaaattccatgcagagggattatggtatttcattatcactgaaccttaaactgtgtgtgtggccgggtacggtggctcatgcctgtaatcctagcactttgggaggccaaggtgggcagatcacttgaggtcaggagtttgaaaccagcctggccaacatggtgaaacctcatctctattaaaaatacaaaaaattagccaggtgtggttgtgggtgcctgtaattccagctacttgagcagctacttgagaggtcgaggcaggagaattgcttgaacccgggaggcagaggttgcaatgagctggtgtcaggccactgcactccagcatgggcaacagagagagactccatctcaaaaaaaaagtgtgcgtgtaaaacagacagtctttgtaggagatgaggtgaagcaagtaggcaggagttagatcctgagttacctttgggccaagccaaggagtttttattttattccatatagatgacagtcactgcagaaatttgaactgatatgcatatatcatgaggtttttttgttttagaaatattattctgtcagtcataagtgaagggactggggacattgggactggaggcaaagagatcttatctctttgcaatagtttgaaagctattgcaatatttgaagagaagattgataaatgcttgaaccagcacagtggcagtacagatggagggagctgactacaataaaatcatcaggacttgttgattgacatgatataggaagtgagggacagggatgagtcaaggctgatccccctagatcctgactaaggaagctgggtggttgacagtgccattcacagagacagtgaattctggcataaacacctaataggtcaggctggtttacacctccatcattcccatgggagaaggtatagaggggtgtgtgtttgtgtgtgtgtgtgtgtgtgtaaaagaacacagaaagccagattcctctttttgacaccagaatattggttcccaccatagtcaaaaggatattcctgaggatcgaggcttggaaaaatattggggaaggataagaactccagttgttgctgctttttttggcagccagtgtaacctaggtaaggacttggttgaattaagaaatttcatgtccagatcaggatggatttttctatttctctgagctctggtgtgtttcccactcagattgcaggtcgtaggtacctacggtgtgaattgtgttgtgtttctgtgcttgtgcaagggagtagctaggttgctgggaggtctggatgagggtgggggtggggtgagatcaagtctccagctccaagaggtcccctggggctaagtgaaaagcttgctcttttgaaatggtcttcgttggtaattaacaaaagatcaagaataccttggtgtcagataaagggaatttgtaggcacaatgctgttggtagctgatctcaatcattcaaggaagctattaaatctatgaacattagcattctgccaggtaaagagatctggtccttagcacctcccagacacactgattctttactgttttgaaacatctccctctcctggcttcctccaccccgcttccatactgtccttgaaatcaatgaatggtaatttagtgtatctagtgtatcactagcaaatgtctgaataagaaaggtttggtttccgctgtgtctcctgttacaatgagaacatgtactgcataaatttaattggctacgttaatgtgtaagccttttctgcaaagagatggatccgtttctgaatattctgcagaagggcagagttttgagtatatggcagtggttctaattagcagttgctccaatacaatcagactgagacggaagctactcatttagaatactggttgatgacaacactggcttgaacaaagtgaccactctccaatggctactctccctctcagtgggccgcaggttgctagggctcaggctgtggctgttttccccgccgaaaaggggcggggtcagtcggtgtgttaggaaaaaaaatgtatatatatatatatgttgtctgcctccccacagagataacaacccgtggaaaaacatgccgttgagcgggaggaaggcgaaaagataggctgggttttttggggggtgggggagcgtggaggatagggtgggctttttcccctccaatgctgcgacgcattaaccctgctgctgttgggacgttctctgctcagcctattggctgagcccgggagccgctgtctgccaatcgggtggtgaaaggcagacaaatctaccccgccaccagcaaaaacggcgcgtaacccttgcggcgccggccgaaccgcgccagagctggcgcggggaaagggagataggtgtctccagctgctgtggctgtttggggcgggtcggcttcatccgcgtctcaggagcaagtagagaattagcgggcggcagcaatgctccgcaaggtgagaagctggacagaaatctggcggtgggctacccttttgttcctcttttaccacctgggttacgtttgtgggcagatccgctacccggtcccagaggagtcacaggaagggacttttgtagggaatgtcgctcaagatttcctgctggatacggacagtctgtcagctcgcaggctgcaggtcgctggagaggtgaaccaaagacacttccgtgtggatttggacagcggagccctgctcatcaagaacccaatcgaccgagaggcactgtgtgggctcagtgccagctgcatcgtgcccctggagtttgtcaccgaaggtcctttggaaatgtaccgagcagaggtagagatcgtagatgtgaatgatcacgccccccgttttccgcggcagcagctggacttggaaattggggaggcagctcctccaggacagcgtttcccgttggaaaaggctcaggatgcagatgtggggagcaattcgattagcagctataggctgagctccaatgaacactttgcactggatgtgaagaagcgcagcgacggcagcctggtcccagagctgctcctggagaagcctttggatcgagagaagcaatcggactaccgcctggtgctgactgctgtcgatggagggaacccgccgagatctggcaccgcagagctccgggtatccgtgctggacgtaaacgacaacgccccagccttccagcaatccagctacaggattagtgtgttggagagcgcaccagcgggcatggtgctcatccagctcaatgcctcagacccggacctgggtcccagtggtaacgtcaccttttatttcagtggtcatacccctgatcgtgtaagaaacctctttagcctgcaccccactactggaaagcttactcttttggggcccctagactttgagagtgagaattactatgaatttgatgtgcgggctcgcgatgggggttctccagccatggagcaacattgcagccttcgagtggatctgctggacgtaaatgacaatgccccttacatcacagtgacctcagagcttggaaccctccccgagagtgcagaacctggcactgtggtggcacttatcagtgtgcaggatccagactcagggtcaaacggagatgtgagcctccgcattcctgaccacttgccatttgccctcaagtctgccttcaggaaccagttctccctggtgactgctggacccttggatcgagaggccaaatctagctatgacatcatggtcactgcttctgatgctgggaaccctcctctcagtacccacagaactattttcctcaatatttcagatgtgaatgataatccaccctctttctttcagaggtcacatgaggtgtttgttcctgagaacaatcgcccaggggacctgctttgctcccttgcagcctctgacccagactctggcttgaatgcgcttatctcctactcactcctggagcccaggaatcgagatgtatcagcttcctctttcatctctctgaacccccagacaggagctgttcatgctactcgatcctttgactatgagcaaacccagacactgcagtttgaggtgcaggcccgggatcggggcaacccaccccttagcagcactgtaacagttcgtctatttgtgctggacctcaatgacaatgctccagctgtgctccgtcctcgggcccggcctggttccttatgtccccaagcactgcctccatcagttggtgctggccacctaatcacaaaggtgactgctgtggacttggattcaggttacaatgcttgggtttcctatcagctcctggaggccccagatcccagcctgtttgcagtctctcgatatgctggggaggtgcggacggctgttcctatcccagctgacctcccaccacagaagctggtcattgtggtaaaggatagtggtagtccaccactctctacctctgttactctcttagtgtccttagaggaagacactcatccagttgtcccagatcttcgagaatcttcagctccaagggaaggagaatctcgtctaaccctctacttggctgtgtccctagtggcaatttgctttgtctcctttggctcattcgtggcactactctctaagtgtcttcgtggggcagcctgtggagtcacatgctttcctgctggcacctgtgcctgtctcaccagatctcgaaggagggaggggcttcccccttccaatgggatcctccgaatccagctagggtcagatgaccctatcaagtttgttgatgtgggaggccactctcatggctgtacacccttggcttctgcacccactcggagtgatagcttcatgatggtgaagtcacccagtgcacctatggcaggggagcctgttcgcccaagctgcccaccctctgatcttctctatgggctagaggtgagacctttgcaggctcaacaaatgcttgagggttattctgatccaggcatatggctaggccatgtcctagagagtactggcctctcagtaagtgcccatagtgatgtcaccatttttgtaagaggtaactatgtggtagacgctgtgctttgtaactgtttcgtgaattaaccagagttgtcacagtttagcattgggggcgggtcatgcctatatctgagtaagaaatgaaagtaattggtgatcaagagccaggctgttgtggaagcatgatgatggaatgtgggagcacaggaggctacagtgcacagggtacagtgcaccaggcagtcacttggacaaaggtggctgttttctctactcttcctgaaagaggggatcagattctgaagtaccttaactctaggttaccatttcccaagggattgaggggaaataaaatctttgtctcccagtatctagtacactgtgaagggacctctctatttgaaacatagagacagcagaaagaggagagaactaaaggaatagagaggcacgcatcagagtggtggcatagatcttttggtctgggtcttaggactcatatcaagtccctactggggatttgaactagatgcggtaaattggaaggttggggcgggttggtcatcacctttggaaaaaacagtaagtgaaatcacttatgtcagaaaactggtttacagttggctgattcatagaaacagccaccctgtgcatctttaagttgagttctcctgaatttggtgaaaccatgaaacctagaagccaagccatccatgcttggcctctgaccaccctcctgggtgacctgattcagccccagaaatgttcccctacccaaaaactgtaacactcattccacatttggggtctggggtgtcagaaaagctaagtcccatgtcagctgacattgagatttccgcaaagcattgctggagagtcagggcaagactttacaaggttcttactaatcttttctctcaccttagcagcattcagcaggatgggggagggtgggggaatacatgggctttgcctctcccagaaggacaagattttgctggttcaagcaaagtggtggaagcttctgaagtcatgcaggaagttgctgggacagaacgctgaggagttttgtatcactttgtcttccctgttgagtaccatctgagctgtcaaactttgctgccaagggggctgaatcaacctgcagcacgaagtgagtggggaggtaggaagcttctgtgacacagatttgcagcctgtgttcccaaggtttccaggattgaggaaactccataattggttgagagcacacagactttttggccaatcagactcagagctgaggtgggagatctgctcttccagcccgcctctcctcctccagctccccagctccactcaaattcagctcccctcccccctgcccacccccgccactcggtgactaagaactgctgcaagcaggcaaacctccgagcagtttttaagaggctggaaggagacataagagacttcagctgctgcattccaagccctgggtctaccttggagacaggacagcacagacttactctccacaaagggacttctgggtcatggggcccaagacactcccacagctcgctgggaaatggcaagtgctgtgcatgttgtccttgtgctgctggggctgggtgtctgggcagcttcgttactcagtggtggaggagtctgagccggggacgctggtggggaatgttgctcaggatctgggcttaaagatgacagatctgttgagccggcggctgcaattgggctctgaggagaatgggcgctatttttccctgagcttgatgagtggtgccctggcagtgaatcaaaagattgaccgagaaagcctatgtggagccagcaccagctgcctgctgccagtgcaggtggtgactgaacaccccctggagctaatccgtgtagaggtagagatcctggatctcaatgacaactctcctagctttgccacccctgagcgagagatgcgcatctcagaatcagcagcatctggggcacgattcccactggacagtgcccaggatccggatgtgggcaccaatactgtgagcttttacactctaagccccaacagccacttctctctgaatgtgaagaccctaaaagatgggaagccattcccagagctggtgctagagcagcagctggatcgtgaagcccaggcaagacatcagctggtgcttactgctgtggatggggggaccccagcccgctcagggaccacccttatctctgtcatcgtgctggacatcaatgataatgctccaaccttccaatcctcagttctacgtgtgggaatcccagagaatgcacccattggtactctgctgctccgcctcaatgccactgatccagacgagggcaccaacggccaactagactattcttttggagaccacacatctgaggcagtgcggaacctctttggcctagaccctagcagtggggcaatccatgtgttgggtcccatagactttgaggagtcacgtttctatgaaattcatgcaagagcccgtgaccagggacagcctgccatggagggccactgtgtgattcaagtggatgtgggggatgtcaatgacaatgccccagaggtgctattggcctctttggccaaccctgtcctagagagcacaccagtgggcacagtagtggggttgtttaatgtgcgagaccgggactcaggtagaaatggtgaagtgagccttgatatctctccggacctgccatttcagattaagccttctgagaaccactactcgctgctaaccagccagcctttggaccgggaggccacatcccactatatcatcgagctgctggccagcgatgctggttcaccttccctacacaaacatctcaccatcaggctcaacatttcagatgtcaatgacaatgcaccccgcttcaaccagcagctttacactgcttacatcctagaaaaccggcctccgggctcccttctttgcactgtggctgcctcagatccagacactggggataatgcccgcctcacctactccattgtaggaaatcaggttcagggagccccagcctcctcctttgtgtatgtcaacccagaggatggacggatctttgcccagcgtacctttgactatgaattgctgcagatgctgcagattgtggtgggggttcgagactccggctctcccccattgcatgccaacacatctctgcatgtgtttgtcctagacgagaatgataatgccccagctgtgctgcacccacggccagactgggaacactcagccccccagcgtctccctcgctctgctcctcctggctccttggtcaccaaggtgacagccgtggatgctgatgcaggccacaatgcgtggctctcctactcactgttgccacagtccacagccccaggactgttcctcgtgtctacacacactggtgaggtgcgcacagcccgggccttactggaggatgactctgacacccagcaggtggtggtcctggtgagggacaatggtgacccttcactctcctccacagccacagtgctgctggttctggaggatgaggaccctgaggaaatgcccaaatccagtgacttcctcatacaccctcctgagcgttcagaccttaccctttacctcattgtggctctagcgaccgtcagtctcttatccctagtcaccttcacctttctgtcagcgaagtgccttcagggaaacgcagacggggacgggggtggagggcagtgctgcaggcgccaggactcaccctccccggacttctataagcagtccagccccaacctgcaggtgagctcggacggcacgctcaagtacatggaggtgacgctgcggcccacagactcgcagagccactgctacaggacgtgcttttcaccggcctcggacggcagtgacttcacttttctaagacccctcagcgttcagcagcccacagctctggcgctggagcctgacgccatccggtcccgctctaatacgctgcgggagcggagccaggtgaggggctcggcgccgccccgggcgacccctgggggcggcactggagaagccgcccgtcctcataagggattgaacttgcatccactcctctccggccggcttggtcgctggctgcgctccacccgattctcgggatcattggaccgtttgcgcgaaaccagagtggccgattaagggatggggctccgagcaccgggggtggtggcgactgtgggcgaggggaggtgggaccgacccccacccctacactcaaaaaaggccggggcctccttcgagcttccggtgaatttcgggcgatttccgcgggtgtcgggggtcccgggaggaggcagtcacagatccacccctgcagccagcctcctaggcgccggctccggcacgcttcgccggtctgtagatttcctcttcgatttctccccagctcccagcatctgtgacttcactgttaccctccctatccccgcatcacccaaccgcacctgtctgcgggacttaggtgtgcgcgcggggctcatgcgtgtcctccctgctggccacccccacggcccacacaagttgcacgggctcgccacgccccgccaacacgtgcgcggacgcacgcacgcactcctcgcacgtgggcttacgcgaataccagctttcactgccactcgctcgcggccagattcacaggcctgttccggtccactcgcagctcccctctgccgctccctccgccgggctcaggagtactcgtagctgattgtgcgcgcctgagggtcccagatcgcggccgcccaggaccaggcgaggactccggagcctcctctcacctctcccacctgcgccccgggctgggccgggtcgcctggggggcggcctgagcgaggcgcggggccaggagcgctggagcgactgccgctctaagtgccgggcgggcaggactctacgatccttgggccagaggtccggatggtcccgggactccgtctcaagggtcggcgacccctcaacccagaagcctcgagcaggcggacaggcagagctgcccagtggccgaggcgcggcagggctccgcgttgggcgagtgagtgagcctctataggacagcaggactgggactccagtggcaccagcggccccttcctcccgcaggaagtgaaagcctcgagcgccctggctctcaacccccagagatacaggcttttggcgccgtcgtgatcacaatgtgcccagcgatctagggtcagagatttggaggtgaccaaactatctgacactctaacaagtcctgtctcctctggcagatggaaagctataggctctgccagatgccagggtgcccttatgtgtgaggaaactacaatagtaaaaaacacaagtttctccaactccaggagcttttattcaaaatatatcaatgcctaactctgctcctaggactgtattttgaaacacccccaggtgattttgatagctgattgagagaaacttactatataactcctttgagaacctcatctcatttgctcttcccaccattgctgttggctaggtactaacatgcctctcttataacagcttcacagaggtcaagtgacttgctcaagttcacagagcaagtaagagagattctaacccctgtctaactccagaatgtgtgcttttaatttcttggcacttggaactttaaaagcttgaggacaggagaggggagttgcctctgctgggattttgcttctgctgggatggggcaagggtggggttccttcccttttaggaccttacatgtggggaaagtcttctgtggctcctcatttctgagcagtccccgcagcgcaaacttggccagttatccttttggagattgagttcccccagctccgtttcctcctatcacaatcactgcatttccatgtagattctgctgtgtctaagaatacagtggctgagggctggccatccctgtgcccttctccatggcagccccagaatggtgctggtgactcccgatacacctggaatgctaggtttctgggttctgctcatatcactgccacctgtgagccttgagtgagccactggcagttccggagcttccttctccctggagtaatctgagatactcacactctctgcttctgggagcaagtatgagtattaattaccagcccaccccagaaccagtgaggaggtggctctaggagtgctccatgagagtgtgtgatgggataacacaccccctggaaagaccagaagggactcaggaatgaagtggctggccagagccccacaccttcagctaggtgggagatggctacacatcagccccttgggagccctggagacttagttggccctgcttggaggctgtgggagctggatccctccccgctgcatcccttccatttttctccgtctcagacagagcagccttgttctcttctccttagtcacagaccattgtctggcacggagttctaggggtgagaagtgtcccgggacttggatgccccgcaaaggcccaatctggcatgactcctaaattaataatgtatttagctgtgggaagagattcttgcaagccaagggcccagagaagatgtccctgtgaatgtgtcactgcacaacctggcaccaaaagggttaccaagaacagcagccatcttgctgcagaggatgctttgttcccagctgaggagttgaataaattcattctagggctggtagaattctcattgaaaagcctcctttgccactttagggggctttgtctgcacctcttcccccagttccacagaagatgccttcagtccttgaattttggctcaggagttctgactctgggggcagggaggaaggggccatttctttaggaaaggagtctcagcttgctcactgtggtcagatgaaatgtgatttatctcttggtttctggtacctcagacctctgagacctgaggtgtattttgtctttggagatgagtccacccctgccccctcttagtccgttttcttctctgtgcccactcccctccttctctcccggcccatccctaggggctcgggtgacattctaacttctcacgggtactcagcccctttccctctgttttctccacagcaagccccgcccaacacggactggcgtttctctcaggcccagagacccggcaccagcgggtaggtgactgattctccagcccaccctcttctctgcggcattttctcagggatgacgtgggaggagatgggggagggcccagcatttgctacagatggcttctccctcagtttgagatcccagggaggtcttggtgtgcggggggctggcacacagaccccggaaggaagaggcgactgccctgactgttcaggaagctcaattcacatgcttgccccttccctcctcgccacgaccggcaccttttcctatcccctgagggcactgtggaaccaaaggatggtcttaagctggtctctgggtgaaagcgaggctttctatgcccatgtactgcctaaccccctcccctgagttgagctgggctccattatgacctggggctcaggcagaaaagcatttgaccggaggaggcggtccgcactcagcgcctcctccagagcctccagagccgaggctgactgcagcctggggagagtggaggcagcacagctggaggtggaactgaggaaggactgggcggggcatggagcaggcccccttctccggcccctcctcccactgtcctctgcccctacttgtcctgctctctgtctgtggggtctccgtgtctctgcccctttttcttgagtttccgtctttgccactttctcttacctctcagtccttccctcagtctctatctcgctttgcaatctctgcctctccctctcttctccatctctgtcttagcttccgtcttgattgctgcacctcagcctcagtccctttcatttgtctacttgcattgatctgtgccgcccactgtgcctgccatggcataagtgctcaataaatgtggagtgagtaactacacgggacccttagtctctttctccttctctatctctgcctccctgtccttgtcctggacctcttttctgtttctcctttcaccgtttcctagcgccttgtgttcttctatccccagcctctatgtttctctgtctctcactatttctgctttcctctctgttctttgtctctctttgtctctgtctctgtatatctttctttgtctctgtctctggtctctgtgcctgttgtctttttctgcctctttctctgttactctttctttatctctctttttcttttatcttgtcttttttctctgagcctctgtctctgtctctcatttttttgtgcttgtgggcaagccagcacacacaaccccccacccaccacccaccaacaccccgctctcttccttccctgcccctcacacactgagcctttgatcgcagctctccaccagacaccctcccatccaagcagccccagctgctcatttcaatctggtatgaattcctgctgagacaggaaccccctgcgggctgaaggggagggaaacttcagcagaaagaccttcagttggtctgagcagagtgggataggctctgcgccaggcctcccagttagaagtcaggagcctggaggagtctcagagcccagggagagaagcaggagcttgggccaccttaccctacctcctcaatggttgagtacttgctgtccacatttgccaagttgctacagatgctgagcttccaagagttatctttcccccatcctgcaaccaaccaaacccttgttgccacaaggacccaggagcccttggtgtatggcagagattccagcttctgggcatgcacagtcctgtcacccattttaggaacgcaaagcgcttcttagaaggcccctaaaaagcagcagatcaaaaggcttgggctgcccttgcccttcctttgaccccagctgttgtccttctccctgctggccttgccaaccttctcataagttatccattaagtcattaatgtattcattcgttcatttattcaacaaatatttatcgagcatctactatgagcagggccctgtgctaaacattgggctataggagtgaacaagtagatgtgatcccagaactcataggcttccagaccagcagaggagactgaaaatttgcaacaagtaacacttaaaaaaaaaaaaaaaggctgggcactgtggttcacgcctgtaatcccagcactttgggaggccaaggtgggtagatcacttgaggtcaggggtttgagaccagcctggcagccaacatggtgaaaccccatctcgattaaaaatacaaaaattagccaggcgtggtggcaggcacctgtaatcccagcgacttaggaggctgaggcagaactgcttgaacccggaaggcagaggttgcagtgagctgagatcacgaaaaaaaaataatctagccacaaatcacagtaagttctgagaggcagagaacaatgtgagtgtaatgggggggggaagatcagagaaggcttctaggaggaggtgacattgagaagttctaggccatttatgttccctctacctaccaccaccccaggccatacactggctttgaagcagaattcaccattgaacctggaagccccaccaactgcctctcatgtgtcctctggggtgagcaccttacccctgcctcaactcccattccatcaaatgagaggcttagtggcctggaatacatgtgggagctcttggagatatggaggagaaggtgcggaacctctctctctctcctctctctgcttccttagttaacttgtggaggatgcaacaaaccttttttttttttttttttagacagagtcttgctctgttgcccaagctggagtgcagtggtgcgatcttggctcactgcaacctctgcctgccaggttcaagcgattctcctgcctcagcctcccgagtagctgggacagcaggtgtgcaccaccacacccagctcatttttgtatttttagtagagatgggtttcgccacgttggccaggctggtttcaaactccccgacctcaactgatccacctgcttcagcttcccaaagtgctagaattacaggtgtgatcgcccccggccacaacaaacatttttgattcagcggctccaaagtgaaataagcgttaggatctagtccagtaacttcaacttctctccttcattcattcaacaaatggtcagtgagcactttctgttggccaggcagtgttctcgatgtgggaggcccctgccctcaaggagtttacagtgcactgaaggagacaaatattgaccaaataattacaaaaataaatgtgagactgaaactgtcataagtgctaggtagaattgtatctggtggtgtgggcgtataatagggatttgatttagggagcaggaggacatcctggaaatgaagttgtgctgagatctgaaagacaaatacaaattaaccagctaaagaaaagaaggaagagcattccagatggtcaggcataccagcttcaaagcagggctggtgttgagttcttcagtaaacttggttcaagatcaagccagctctgggtcacactgcctacacagaaggaagagcattccaaatgggaaaagcctatgcaaaagccttgtggtgaggcctcctgggatcaagggaatggcagggagttttctctttgctggcactggagtgaggggatgaagaggagaggttccttttatccagtctaaccctggttccagccttctgttgatgccctgcctcactccctccccaccatcttgcccactgccctccagcctggtctggtcagacacaccagcttcaaagcagggctagtattgagttcttcagtaaacttggttcaagttcaagtcagcactgggtcacactgcctagacagaaggaagaagacctggccaggtgtggtggctcacgcctgtaatcccagcactttgggaggctgaggtgggtggatcacctgaggtcaggagtttgagaccagcctggccaacatgatgaaaccccatctctagtaaaaatacaaaatattagccaggtgtggtggtgcacacctgtagtcccagctactcaggaggctgaggcaggggaatcgcttgaacccaggaggcggaggttgcagtgagctgagatcacaccactgcactccagtctgggtgacagagcgagactccatcaggaaagaaagaaagaaaaagagagagagggagggagggagggaaggaaggaaggaaggaaggaaggaaggaaggaaggaaggaaggaaggaaggaagaaaagaaagaaaaagggagaaaaaatgaagaagacttacattctgaagttcctgcttggcacatgcttctcctccccaccactatcccttctcaggtcatcctttgggtgtctgatcccaatagctgttgtctcaagctctgagcccagcaaaccatttcccccttcttaggctgtaacccaggccctgccctgcagctgtccccagcctctgcacaaagagtctccatttggtccctagactgttctctgatggctccacactaccatccctcctctgagagacagtatccctgctctctctcagtttgggcagtcattcaacaaacaaatagcaacttaatttttttccacttataaaatagtacatgctcattatagaaacatgaaaaatagaaaaaaaattaaaaggaaaaccacccatcattttacaatctagggagaaccaccaccaactacagtttaatatgaaacatttcaaatatgtacaaaagtagagagaatggtgtcatgaacctgtatgataccactatccagcttcaactaatgccttatcttgtttcacctatatccctacccttatcctgtccttggattcttttgaagcaaatctcagacatcatataatttcatcttggtctccaccatctttaacagatgacttttttttttttttttttttttggagacagagtctcactctcttgcccaggctgtggcacaatctcagctcactgcagccttcgcctcccgggttcaagcaattctcatgcttcagcctcctaagtagctaggattacaggtgtgcaccaccacacacagctaatattttgtattttcagtacaaacagggtttcgccatgttggccaggctggtcttgaactcctggcctcaagtgatccaccctcctcggcctcccaaaatgttgggattacaggtgtgagccaccttgcccggccagatgattctttcataaggtccacattttatatttgagtgagtgtctcttaagtatcttaatgctcttttaatgtaaaagacttcccctccatcttccatttttgcaatttatttgttgaatccctgccttttcatatatatctttctaaacttttctttgtgtaatcaaagaacatgcatgagcttcatttttatttttatttatttatttatttatttatttatttatttatttattgatacgtagccttgctctgtcacccaggctggactgcagtggcgcaatctcggctcactgcaagctccgcctcccaggttcacgccatgctcctgcctcagcctccagaatagctgggactacaggcgcccactaccacgcccggctaattattttgtatttttagtagagacggggtttcaccgtgttagccaggatggtctcgatctcctgacctcgtgatccgcccgcctcggcctcccaaagtgctgggattacaggcgtgagccaccgcgcctggccgagcttcattttaaaaaaatctcattcacctaaataagttgttcacaaacttgtcacactttcatgtgacactttattcacatattaagaactgttattcccagtcatacggtacatttcctactagttttttaaaaatagcaactgaggccatactgtccaacagaattatagcttttttcttctttgcagtgtatcatgagaatttccccatgtctttcaaaattcttcccaagtcatttgcagagtaactcctcttatgaatatacatattattttacagaataagtcctcatatgaatatacatattatttttctaatgctaatgggcttttgctacattagaaaacatacacattcatttacaattttttttttttgagacagtctcgctctgtctccaggctggggtgcagtggcgccatctcggctcactgcaagctccacctcctgggttcaagcaattctcctgcctcagcctcctgagtagctgggactacaggcacgcgccaccacgcccagctaatttttgtatttttagtagagacggggtttcaccatgttgaccaggatggtctcaatctcttgacctcgtgatccgcctgcctcagcctccctaagtgctgggattacaggtgggagccaccatccccagcctcatttacattttaacacaattaaattcagggtgttgtcagggtgacttcctagatttctcagttttttgagcatgatgtagggagtattttattatagtccagtctatgggatattcccttatacacacacacacacacacacacacacacacacacacacacacaccccaaactcaatagggcaagaaccatattcatcatctcttaaatcctaggtcctgtcacaggccactgcttggaaaatagttgactaaatgtagtccatttcttccatttttacttttcactattccccaaatcctggaagagtccctcatatctgctgctggggctccaaggcctccaagctgaagcccagtacgttgttgtgcataagatcataggccctggaatcatattaggctggctttcaggttgcaactctaccagttccagctgtgtgactctggtatagtctctcaacctctctgagccctgttttcatctgttggaaaatatagataatcacaacacttatctgcagggtgattccgaggataaaaaagacaaatatattacccagtcagcttagaataggaagctctcagtaaatggttaaaaaagaggtctctctccctctgctcatctcttacccagcttcacataattggcagcccacccacctgtttggccctcaaccttcaaccatttcccaggacgcctccttacactcctgatcatcatggttccaaccccactgttccactcagctttgttccctcaacaccactgctccctgtgacaggtcatcctcctaacctctggcatctggtcccgttgtctccctgacaacccgcatgctctcctccctgcaacccccgccgcttgcctgctctccctactttattcccattagcccccttcacctggggctgagaacacctggccttgaccctgcaccctcagccaggcccacagagctcagtcgggccggaagtaaggaccccagatattcagttgaggaatttaacattaatacaataatatagaatccaccagcagattttcataaatgttctgtgtgttcttttatccttttttttaatccaggattttatcaaggagcatagattgcatttggttgtcacgtctttcctctcctttaatctggagccagctcccagtctttttatttttttaatgacatggatatttttaaagagtccaggccagttgtactttaaaatgtccccgaacctggatttgctggctattctctgatggttagattcagattacacaccttggtaggaatacttcccgcagcatcacactgggactcatctaacgtcggcctgtcccactatcagtgatgccgagtttgttcgtgtggtaaaaacagtgtcccagatctctccattataaaaatatatttttataaagatattttaaaatatttgtgaaaatataagtaatctgtggatgatactttgagataggcagcaacccttcatgcaattttagtattccctgatgatccttgcctgtatctgtttttacatcagtgattacaaagcggtgatgttctgtcattccttctacatgtatttgctggtattcttctgaaaattacctggatgatttcttcagatttaaattcactgtcttttccttggggaagcctggactggctgagctgcctaaccctgactctctgtcttttttttttttttgacagggagtctagctctgttgccaggctggagtgcagtggcaaccttcacctcctgggttcaagcgattctcctgcctcagcctcccaagtagctgggattacaggcgtgtgccaccatgcccggttaattttttttttttaatatctattttagttgagacagggtttcaccatgttggtcagaatggtctcgatctcctgacctcgtggtctgcccgcccctgcctctcttcataccctctggtagcccctgacacagcccatggcaagtatcacaattgcaattactctattgtgtaattatttaaaatcagcctctcagtgcccaccatgagcaccgtaaagatggacagtttctatcatactcacagccacaaccccagcacctggctctgtgtctggtacatagaaattgctcaagaaagaattgttggaggggcgcggtggctcacgcctgtaattccagcactttgggaagcggaggcaggtggatcatgaggtcaggagttcgaaaccaacctggccaatatggtgaaaccccatctctactaaaaatacaaaaattcgctgggcatggtggcatgtgtgcacttgtcgtcccagctgctcaagaggctgaggcaggagaatcacttgaacctgggaggcagaggttgcagtgagccgagatcgcgccactgtactccagcctgggtgacagagcgagactccagctcaaaaaaaaaaaaaaaagaaaaaagaaaagaaataattattgaatcaatggaaacagaattacaactcttcccacttttgggaaggagaattgagattcctgctttccccttcaaccctagctttatgtttgttgtgatggtatagaggtcacacatggcagccttgtgtctgttcttaggctgagttcatctacttagggacggggaatcccagattgggcaaaaccaaaagcagggacagaccttggaaaaattgtaaagcagttcttggttgtgctcacccaccatgacaaaatatgcacacacacaacgcaacacacacacagacattttcatgccttcaaggcctaccctacagcctttcccatggtgccaaacccttcttcttaccttacagtcacttaactgtctctgctggtctcttcccactcatttaggcaacaaatatttattgaaaaacttctctgagccagatggtgccaaacagttacctaaagggcagactgtgtgtgtgccagggctgtttcccgccaacactcccctgcaaattgaaataatttcatccttggaaattcaaaaaaatcatgaaaattgtcactgtgggaaaattccaagtagagctgaaccttctaagaagcagagagttcttcttatggtttagtatttttttaaattatgaatcatttcatgttttttcaacactcggagtttctaaaagtctcacttaggtccaagtgctaggctttgtgctaggtgcttcagtaggaagcaggtggagtcgctgcctcacagaagccagtgtggtggaggaacagacaggcactacaacagctgcagtgtgactagtgccatgtggggcagccgctgggatgggagtacagtggaggcacctgcccagtctgagtggatctcctctgatatattttattcgtgtcatcatggcaaatgttgggggactggcattctagggaacaccatctgcccaggattcacagcaagagggaacttgagggataggaaagtgcaccttggaaaaggtttgatgatagagtgtttgagggcggggggtgggggttcttgtaaaataggaggggcaggttcttctatggccgtggattttactctgagggcttaggaagccattgaattttagaaatttcttctccctgctccagggtctcttggggcctcctacatctccccctaggtacctcctaggtccccactttttctctagctctggaacattctcttccatttcccaccttcacagtcctctggagaaggtctgatctccctcactatgacaggaagccaggctctctcatggtgggtgggggaatgcactatgttcaatgcattggaccagcctggccaacatggtgaaaccccgtctgtactaaaaatacaaaaattagcctggcacagtggcaggtgcctgtcatcccagctacttgggagactgaggcaggagaatcgcttgaacccaggaggtggatgttgcaatgagccaagatcgcgccactgcactccagcctggatgacagagtaagaccctgtctaaaacaaaaagaaaaaagcatcggaggcagcaaagagctggtttgagggactgacttgtgggattctggcttctgaaggattgtagaagtgcctcctaccttgctgagagaaacaggtcttgggcatggggtagggttagggtactaggtttgggagccctgggagaggacaggaggggcatgagctgtgccggcctgggagtctgtgctcaccatcctactctctccccagctcccaaaatggcgatgacaccggcacctggcccaacaaccagtttgacacagagatgctgcaagccatgatcttggcgtccgccagtggtaagtggtgtcagtgtgtgtatggaagagtgggagacctggggttctggggtgcatctcacagccaccatgcccacggactggatgtcaaacctgtgtagtttctccagatctttcggcaggtctgaaaggacccacaattccaaacataaagcctggaattgtggctaaggaacagcagaggggttgggggtcctgggatgcctggaggagagcgaacaaggaaaagactcatggagggaatagtggttacaagtctagctctggaatgggacagtgtagctcaggtcctagctctgctactatccttgggacttggatcgacttgctcaatctctctaaacctcagtttcctcagcctagaaagtggggacagggaccccaaagggttgttgtagagattaaatgagatgataccacaaagcatagagttctgggcctggcgcttggaagccctcaagcaatgaaagtgggtgtagaaatccccagccgagagaacacctcctctttatgcgaggctcctcttttgctgcccctaactccagagtaggattctggttttcccataaggttgactaagggcttcctttgtaatagagattcggctagtggtggttgtccctgaagagtcactagggcccagagcaggagaagaagaatatcatttgtccttaagagcacagcctaagctgggcgtggtggctcacgcctgtaatcccagcactttgggaagctgaggcaggaggatcatgaggtcaggagttcgaaaccggcctggccaacatagtgaaaccctgtctctactaaaaatacaaaaattagctgggcatggtggtgcgtgcctgtagtcccagctacttgggaggctgaggcaggagaatcgcttgaacctgggaggtggctgtggtgagcagaaaatcgcaccactgcactccagcctgggcaacagtctcgctctgtctcaaaaaaaaaaaaaaaaaaaaagagcacaggctttagaggcaggccaatctggattcaaatcctggcacctggcaccaccacttagcaatgagtccttaggtaagttattaaaccccctcggtttcacttactattaatgggcacagtattaacggatctcattgtggtgttaccagggccaaatgcaagtccctcagcacaggattggcagagagtaagggcacaatatattattatctttgctgacccaaacccgttttttactgggtagaaagcagaattagaataatgcctattaataaagactagcttctggagcagcaaatcctgggcttataaggaggctggcagaggatcaaggcattgccctatatcatgaactgatagccctgccctccagcatgtctggaggactggtgggtagagaaccaggtgaaatcacaagaagcactgtcatcacacctgggcacatactaaacaaactttaggggcctcctgtcaatgaatcctctcaatagctctgcaaggcaggtctgatttctcacactcgacagatgagagaaccgagaaggcacttgccccagggtcctcagttttgagctgccaagctgaggttctaacctggctcaactcctaagtttatgctctttctactatagggaccatggctgcctttggatccagcctcggcttctctattacctgagcaggatgagaggctgtcctcttcctcgagctctgctttattcttccagatcagggttgccagataaaatacaggatgcccagttacagttgaatgtcagataaacagcaagtactatttcagcataagtcagtctcaaatgttgcatgagacataatgtactaaaaaaaaaaatgctcattgtttacctgaaattcaaatttaactgggagccctgtacttttatttactaaatctggcaactctaccccagatgtctgtgaggttaagtggggccaggcctacagctgacggaaggacagagagagaggtggcagggactgctggcctcctgaggcagagctgtcccaggtctggtggggctatgattccagagaggccagagactgagtatgaaagtggcaggcggctgggtctgaggagatgccaagttggcctcttgagggaaataaacaggtatatttagctgttgtggccttgcgccctgaggccaggaagcagctttttagcctaaatccagatgttaaaaacagaaatgaaatcagtatttatggccccaaaccctccaagcaagtcatgcagctcgttcccctgtcaaggcctcccacctttggcccacacagggcctgaccctcgtctaagcctgcgccctggggaacggaccctgggggtggaggtggtgggtcaggccctgctctcactttcacacccgcttcctagccctgaaaccagagaggttcctgaagtccagcccagccaggcctgtggggctgctgagaggggttaagtaagagggagagtaaaaaccgacacttgggaggaggcttttaaaataaacatctgcggggagggatgctctcaaggaggctgcggtttgcagctcagccagctgtgttccagctaatcagcctccttgggctactctggagttgctgccttggccctgggatggggtaggttaagaggacagagggaggtcagggagctgggggctgagtttccctgagtagaggctggcacaggagagaaggcatcacccccacctcgtccaggccagaagatgtccagcttcttgaggctctcctaagtctgcctctcctgggaccaagagaaaatcccggtccttgaccaaggtgggccttggggggagtggggtgtagagggaggggcactggagaactgactctacagaaagtcaaagctggcaatccaacttcttcccctcagatttatagatgggaaaacaggcttgagccacgcagagacttgaccaagctcacacagttccttagtggcagagcagagcaaatattctctttcttttacattctggatttccatatcttctctccctcctggtccagcccaacctcagggcaccccccacgaggtgggcgggggatggctttgtcacttgcacccactcggggtgctactcagagatcttgggtgcacataggacgtgggtgggccgagcttctagctactccgtcaggcccttcctgtcattctgtctctgcctcccttctccctgcttctccgtgttcctcctcattcttttctgtgtgcagggagactacaccccccaccccgctctttctctggcgcctctgaggtcccccctctagcccctaaatcactctggaatcctggctctttgaagccagatctgggcccccctcccctaccccttccattcccaggctgggaaaggctgaagaggctgacggctggaggggagggggcggggcggtggcggatctggcttccttttggagttaattagggaaaacagagaaatgtcagcggaatgaaagggctgggggtgggggccagctggggtaggagaggaggaagtgggcagctgctccctcccactcaacccctctcccccgcccccagaaagctctcagctccggggatttgcgacatgaaatgggggctgtagaaacctgagcgctggtgcgtgaagagaaaaaccgaggcgcatcccggctctcccctcccgtgtgccctcctcctcttatgccggcttgaaaatatttcctgtctctctatttctcaatccctggttgatgtcccaggattactcagcctctccggctttagtcactctcgctacccgctcccagggtccagggtggaggcagagggaggctgggagagaagctctactgccagctgggcctgggctggcctgggcatccctgaggttttaactgtctcctaaccacagaggatctcagggcctccagcagcgagccccaatgagtcaaactcttgtttcctcctctcccacccccgacccagtcagggcaggtgaggggtagaggtgatggcatgctggatgtgacggtgttgatgatgtattgcacaggatgaagcaccatctcatttagtcctcacagcagccttcacagtgcgtacaaatcagctggcaattccgagaggctgcattctaaacaagttcctgggtgatgctgagccagggccagagtgtggacttctctgggccccagtttcttcttctgtacagtgggacgttggactggaggtgctgtctgatgtcacctagctgtggcactctgagcctgtgcctaaagtgtccctgagatgtctagtccccgagatcatcatctcctcagcttcatagagccgagctcttctccatcttctctctacctcccattcactcagaacagggataaggtccaagctgctggtggtgatggtgactgactgtcccttccagcatgcgcttaggtacacttgggcctgaatgcccctctaacaaatgctaccgggtatggccttggtccttctaacacttggttccctcatctgtaaaatgagggtcataccacatagctggctgggctgttatgtagaggttaaaagtgattgtgcatgtgaagcatccagcagagtgcctggcacacagtaggtgctcaaatgctgttttgaaatacaaaaattagctgggctagtggtgtgcacctgtaatctcagctactcaggaggttgaggcaggagaatcacttgagcccaggaggcagaggttgcagtgagccgggatcgcgccactgcactccaggctgggcgacagagcaggactccatcttaaaaaaaaaaaaaaaaaaatgctgttttgaaatggaggcttggaagagcactcttcacccccaccccacacacttactaacggaactaccgaatctctactcgtgccaggccttgcttggcaaaggctaggggcatgtaaagccatggtttcatggctgctgccctccaggagcccatggtctagtgtgggagtcagaggctcccttgagaaagccagggcaaggaactgagagcccgtgtcacagccctgagagaaataccagcgaatgtgttttgagcacttacatctaccaggcactattttacgtacctgacatacattttcttatttagcattcactaaaaccagaagaggtggttaccattatcatccccattttgcagatgagaaaactgaagtggcataaggaggttaggtagacttgcccaggatcacagtgagtaaggaaaggagctaggaatcaaacctagactttctcactccagagcctcttaacctctaccctcaactcttgtgaagagagactaccttggtgacccctatattcccagtgctcagcgtggtcaaggcccagggtgctgtataggcattcattaactgctggggatataagacagtgactgttgaggaccctaagtttagctcccacctgatcttcctctgtctctgcagaagctgctgatgggagctccaccctgggagggggtgccggcaccatgggattgagcgcccgctacggaccccagttcaccctgcagcacgtgcccgactaccgccagaatgtctacatcccaggcagcaatgccacactgaccaacgcagctggcaagcgggatggcaaggccccagcaggtggcaatggcaacaagaagaagtcgggcaagaaggagaagaagtaacatggaggccaggccaagagccacagggcggcctctccccaaccagcccagcttctccttacctgcacccaggcctcagagtttcagggctaacccccagaatactggtaggggccaaggccatgctccccttgggaaacagaaacaagtgcccagtcagcacctaccccttcccccccagggggttgaatatgcaaaagcagttccgctgggaacccccatccaatcaactgctgtacccatgggggtagtggggttactgtagacaccaagaaccatttgccacaccccgtttagttacagctgaactcctccatcttccaaatcaatcaggcccatccatcccatgcctccctcctccccaccccactccaacagttcctctttcccgagtaaggtggttggggtgttgaagtaccaagtaacctacaagcctcctagttctgaaaagttggaagggcatcatgacctcttggcctctcctttgattctcaatcttcccccaaagcatggtttggtgccagccccttcacctccttccagagcccaagatcaatgctcaagttttggaggacatgatcaccatccccatggtactgatgcttgctggatttagggagggcattttgctaccaagcctcttcccaacgccctggggaccagtcttctgttttgtttttcattgtttgacgtttccactgcatgccttgacttcccccacctcctcctcaaacaagagactccactgcatgttccaagacagtatggggtggtaagataaggaagggaagtgtgtggatgtggatggtgggggcatggacaaagcttgacacatcaagttatcaaggccttggaggaggctctgtatgtcctcaggggactgacaacatcctccagattccagccataaaccaataactaggctggacccttcccactacataatagggctcagcccaggcagccagctttgggctgagctaacaggaccaatggattaaactggcatttcagtccaaggaagctcgaagcaggtttaggaccaggtccccttgagaggtcagaggggcctctgtgggtgctgggtactccagaggtgccactggtggaagggtcagcggagccccagcaggaagggtgggccagccaggccattcttagtccctgggttggggaggcagggagctagggcagggaccaaatgaacagaaagtctcagcccaggatggggcttcttcaacagggcccctgccctcctgaagcctcagtccttcaccttgccaggtgccgtttctcttccgtgaaggccactgcccaggtccccagtgcgccccctagtggccatagcctggttaaagttccccagtgcctccttgtgcatagaccttcttctcccacccccttctgcccctgggtccccggccatccagcggggctgccagagaaccccagacctgcccttacagtagtgtagcgccccctccctctttcggctggtgtagaatagccagtagtgtagtgcggtgtgcttttacgtgatggcgggtgggcagcgggcggcgggctccgcgcagccgtctgtccttgatctgcccgcggcggcccgtgttgtgttttgtgctgtgtccacgcgctaaggcgaccccctcccccgtactgacttctcctataagcgcttctcttcgcatagtcacgtagctcccaccccaccctcttcctgtgtctcacgcaagttttatactctaatatttatatggctttttttcttcgacaaaaaaataataaaacgtttcttctgaaaagctgaacgtttctgtataagcgatggaagctcctggcatgtgtgcatgaagtgatgagctgaggtgggtgctggaagaagggcggaatcgggaggccactttgtgtcattgcgcgtctagatgtttccgaattgcgtgtgtgtgtgtgactgtgcaatatggttgtgtatgcttgcaatgccgttgtgcctatgagacagtgtgcgattgtgtgcctatggatctgtgtaccgtgtgccattgtgtgatcggtccgctgtgggggtggggatctgagtgcggcgtgtcagtgtgcagtggagtgtgcagtctaagcttgcggctgtctccaggcagaagaggagaccccggcgcgggcgggggcgggttggcgccgggcaaacgccttgggtagaggggagaggacgtttcgttagttcccgccccttcctgactaaaattgcctacccgaagcgccccggagggcttcacgggaggagggtagactctcctttgcccccgcacccccacccccgctgcctaggggttttgggaaagccgcgggagtgggagggaatgcgggaggtgattcttccaaagccaagtctgcagctcgagcctcagtttccccatctggaattcgccttcccgctgacatctccgtagcgaagcctaagaaattggagggctcatcctcttcttgcgggggtcaaggggactgaaaggacgtgcaggaaatgagatccatcgcagactcagctcccctccctccttcctgtcggtgcttttccactcactcgcctgctctcccatctccccgccccctccgcctgcctcctcgaagcactgtgggattccgaggttgctgcagccagagaagctgcagaaaaacacggagctgggggtgaagggggacttaaaaggggaactacccggaaggacccaagaacacaaagacagagccactgcggttatctggctggtcagcaagggtatgcggcttcctccgcgctgcggaggctcccagagccaggtcacccattctgccagctcaagtctgttgtcatgggaaccaaaccttccaacttaagaatctgggggcgactttctagcgtgggaggaagggtggtgtgcacggttgctgagatggaagcagggttttgttactcagagccaggctgcggaggggcggggtgccgggcgcctgggttctattccaggcacagcagcagactggcagagcgcgtgagcagctgtggtttgtcccctaattggtatgtgtgcctataaagctctgaaccagaaaggcgtggcctccggggggacgggagggaggcggcaggcaacccatccccacacctcaggccatactgaggaggcagctgcccaggctccagggctatttaaaaggcttttatttccagttccagagcccgcccgaatgggtttgtggtcctctccaggcctctccctgtctatcctgggcctgctcattgctggtctggcttttttgtgcaggtcataacg

SEQ ID NO: 453 - DNA, 145586 bp, Homo sapiens
  source 1..145586: mol_type = genomic DNA
atgtttgtataaaggtgacaatgagtgtctgtctagaattctggttactgtgagtagtttaagatgctataatgcttttccactataaggtgaattcggtgtggaactcattgcttattgctgcacacttgcctagttttagagtaacaatacattatgtaggctaaagataatttctttaggaagattttctggtttgaaaatggaattaaaactgtaagacacctgtcagaaacatggaaaatggcatgttattgaccagggaaaagtgtaaataacaaaaagttaggattatcagatggtaaactggggaccaaggaaaagtggacaggaagattacttatataattaaataatataattataaggacttacaattcactccccaatcctaataacgcatcattgttaggctacttgagaagaaacagtacatttcaggacaattgtgatgtagtatgaaaaaacatcctttgtaaaagtttttcatttgggccagggtggttcatgactataatcccagcaatttgggacgctgaggtgggaggattgcttaaagccaggtgttctagcccagcctgggcaacatagtgaaaccccacctctatagaaaaaaaaagttttcaatcatacttatttaattaaaagtagacacttggaaacaaaggaaaagagaccctcttgctttttactatacttctattttataaggtcaatcatttcctcattacctttaacttcttttggggggagataataaagataaaagagaagaaagtgaaacatagaataaaactaaaagctatgacattataacttttagaagttagaagtaaaggaaatagaatgcaataagaatacacgtgaagctgatatttcaagcctctttatactacgtcttctgccatcaccaaaaatagcttccatttgtatgattttctatgtattattttatttggccctcatttctactagagtaagcagagaagatattattatgaccattttatgaaaatggaaactaaaaacgtgacgggattgagcaagattatctctgccctttgacaagtaaaaggtacttgatttggatggataaagctcaaattaaaagaaataacagactaaagatatagtaagtatatttaatgttttttaaaagtccttttaaaatgggaagaaagtatcactatcagtacactgccgatttttctcctaactagctccttatttggagctgatttagtcaccattactgcagttctgcagcagaggcgccgggtgccgctcttggctagtgctgtgcaaaatattggctcctcccgctgcagccagctcggaagaaaagtgcactctctatcaggcttcctgcagcggagacacccattagagaacccaagcacaaagacaaagcaaatagttggtcctgctcggagaactcttgggattatttaaagatctcctctcctcggatttagaaaggcaaaggcgcagagagcgggatgggaaatagctccggatggaggggcccagcagggcagaggcgaatgctatttctcttcctgctctctttgttagaccaggttctctccgaaccgatccgctacgctattcccgaggagctggacaggggctcgctggtagggaacctcgccaaggacctggggtttggcgtgggggatttacctactaggaacctgcgggttattgcagagaagaaattctttaccgtgagccccgaaaatgggaacttacttgtgagcgaccgtatagaccgagaggagatttgtggcaagaagtcgacgtgtgttctggaatttgaaatggttgctgaaaagcctttaaacttttttcatgtaactgtgctgatccaggatattaacgacaacccaccgacctttagccaaaatatcactgagctggaaatcagcgaactggctctcactggagccacatttgccctggaatctgcgcaagatcctgatgtaggtgtcaattcgctgcagcagtactacctcagccctgatccgcacttctctttgattcagaaggagaacctggatggcagtaggtacccagagctagtactgaaagcacccctggacagggaagagcagccacatcaccacctggtcctcacagctgtggatgggggcgagccctccagaagctgtaccacccagatcagggtaattgtcgcagatgcaaatgataaccccccagtatttactcaggacatgtacagggtcaatgttgcagagaacctgcccgctggctcctccgtattaaaagtgatggccattgacatggatgagggcatcaatgccgaaatcatctatgccttcatcaatattggcaaggaagtgagacaactgttcaagctggacagtaaaacgggggaactcaccactattggagaactggactttgaagagagagatagctacacaattggggtggaagcaaaggatggtggacatcacactgcatattgtaaagtacagatagatatttcagatgaaaatgacaatgccccggagataaccctggcttctgaatcccaacatatacaagaagatgctgagctggggactgccgttgccctgatcaaaacacatgatctagattctggatttaatggagaaatcctatgccaactaaaaggaaacttcccctttaaaatcgttcaagataccaaaaacacatacaggttggtgacagatggagccctggaccgggagcagatcccagaatacaatgtgacgatcacagctaccgacaaaggcaatccaccgctctcctccagcaagaccatcactctgcacatccttgatgtcaacgacaacgttcccgttttccaccaggcctcctacaccgtgcatgtagctgagaacaatccgcctggagcctccattgcgcatgtcagagcctcggatcccgacttgggacctaatggccttgtctcctactacatcgtggccagtgacctggagccgcgggagctgtcgtcctacgtgtccgtgagcgcgcggagcggggtggtgttcgcgcagcgagccttcgaccacgagcagctgcgtgccttcgagctcactctgcaggcccgcgaccagggctcgcctacgctcagcgccaacgtgagcctgcgcgtgttggtggacgaccgcaacgacaatgcaccgctggtgctgtacccagctctggggcccgaaggctctgcgctcttcgatatggtgccgcgctctgcagagcctggctacctggtgaccaaggtggtggcggtggacgcagactcgggatacaacgcctggctgtcctaccacattgtgcaggccagcgagcccgggctgttcagcctgggcctgcgcacgggtgaggtgcgcacggcgcgtaccttgggcgacagggaggccgcccgccagcgcctgctggtcactgtgcgtgatggaggacagcagcctctttcagccaccgtcatgctgcacctaatcttcgcagatagcttgcaagagatacaacctgaccttagcgaccgccccactccctctgaccctcaggcggagctacagtttcacctagtagtggcgttggccttgatctcagtgctcttcctcctcgcggtgattctggcaatctccctgcgcctgcgatgctcctccagacccgccactgagggctactttcagcctggtgtctgcttcaagactgtacctggagttctccccacctacagcgaaaggactttgccttattcctacaatccgtgtgctgcctcacattcctcaaacaccgagtttaaatttctcaatataaaggctgaaaatgctgcaccacaagatcttctatgtgatgaagcctcttggtttgaaagtaatgacaatccagaaatgccttctaattcaggcaatttgcaaaaggtgagtttcttcaaacctttccttccataaatataattgggtttcaattcattgatttagagataaaaagaatacagattaaatattccctgattacattattttattgattttctggtgtagagtagggtgtctaggaaattctttgtagaatttcctgtagaatatctgtgttgcagttgttctttcatagaaagcctccttttgatagtcttgaaacttttcttaatcctaatacactataatctgaaacatttttaatacagtattatctcacactgtcattttcagacatatctatccagaattagacccaaatcctcacaattaagtggtttacttagttttaatgcagtcaatcctaaaatatatgaaacattatgtatatcttaacacatttttaatgtaacctgtatataatatttttacttccctttgcatgtttttaaaagtatacacagatgttgcctatgtcagggcagtttttaacttctatgctaatcaaaagaaataatggcatctaaaatggcaactcttgtaatgggcactgtaatgaattggttcaaaatgtgtttgtgtagcatatgcctgtagtcccagctactcgggaggctgaggtgggaggatcccttgatcccaggaggtagcagctgcaatgagctataattgtgcccctgcactctagcctgggagacagagcgagactttgtctccaaaaaagtgtttgtggttgttggtacccttactgaaaatgggactagcataaatggtggtgaaatgtgatgataattcaaaatttacagaagattgtaatattatttctgttccccaaggtcctaagagatattttcataaaaatgaatggtaaacttcagagaacatttaaaattattcaaaataatctcttacactcttctaaatgcttcattatcttggggagggaaatattatgagtgtcatctctgcagatttagcagaaataaaatcctctgtgtgatagtttcacaaaacgatgcagtattaagttaggactctaagcgtcgctgttgaccaacctgggcaagaaaatcaacggaaactcaagttacatcctccaacaacaaagcaaattagacgggaaagcaggaaagctgtgcagaaattctgacctgaaacgcttcgcatccggtctctgcttgttgaaggaccttcaccgctatttctgagaagagcaaaagtgatgcagatctgttcttcctcttcttaatcccagagaagttcctaataagccagtaatggcgcctccgcagaggcatccgcagcgcagcgagcaggtcctgctcctcacgctcctggggacgctgtggggggccgcggcagcgcagatccgctactctattcccgaggagctggagaaaggctccttcgtaggcaacatcgtcaaggatctgggactggagccccaggagttggcggagcacggagtccgcatcgtctccagaggtaggatgcagcttttctctctgaatccgcgaaacggcagcttggtcaccgcgggtaggatagaccgcgaggagctctgtgctcagagcccgcggtgtctggtgagttttaacatccttgtcgaggataaactgaatctttatcccgtggaagtggaaatagtggacattaatgacaatacaccccgattcttaaaggaagaattggaagtgaaaattctcgaaaacgcagctccatcctctcgttttccactaatggaggtctatgaccctgatgtgggaatgaactcccttcagggatttaagctcagtggtaatagtcacttctcagtggacgtgcaaagcgaagcccatgggcccaagtacccggagctggtgctggagggcacactggaccgggaaggagaagccgtttaccgcctggtccttactgccatggatggcggcgaccctgtccgctcaagcgtcgcccaaattctggtaacagttctagatgtgaatgacaacactccaatgtttactcagcctgtctaccgtgtaagtgttcctgaaaacctgccagtaggcacaccagtgttggcagtgactgccaccgaccaggatgaaggagtccacggggaagtaacttattcctttgtgaagattacagaaaagatctcacaaattttctgtttgaatgttttgactggagaaatttcaacttctgcaaatctagactatgaggactcgagtttttatgagctgggtgttgaagcccgggatgggccaggtcttcgagacagagcgaaagtcttaataactatcttggatgtcaatgataatgtaccagaagtggttgttacatctggaagcagaacaattgctgaaagtgcacctccaggaacagtaatcgccctttttcaagtgttcgatcgagactctggcctgaatggcctggtaacctgttccatcccgagaagtctcccatttgaattggaaaaatcagttggcaattattatcgattagtgacaaatgcagctctagaccgggaagaggtattcttgtacaacatcactgtgacagccacggacaaaggaacaccacctctgtctacagaaacaatcatctctctaaatgtggcagacaccaacgacaacccgcccaccttcccccattcatcctactcagtctatgtccttgaaaacaaccccaggggtgcctccatcttctctgtgaatgcactggaccctgacgtggaccagaacgcccaagtctcctactcactggcagaagacaccctccagggggcgcccctgtcctcctacgtgtccatcaactccgacactgggattctgtacgccctgcgctccttcgactatgagcagttgagagacctacagctgtgggtgacagccagcgacagcggggacccgcctcttagcagcaacgtgtcactgagcctgtttgtgctggaccagaatgacaatgcgcccgagatcctgtaccccgccctccccacagacggttccactggcgtggagctggcgccccgctccgcagagcccggctacctggtgaccaaggtggtggcggtggacagagactcgggccagaacgcctggctgtcctaccgcctgctcaaggccagcgagccaggacttttctcagtgggcctgcacacgggcgaggtgcgcacggcgcgcgccctgctggacagagacgcgctcaagcagagcctagtggtggccgtccaggaccacggccagccccctctctccgccactgtcacgctcaccgtggccgtggccgacaggatccccgacatcctggccgacctgggcagcctcgagccctccgccaaacccaacgattcggacctcactctgtacctggtggtggcggtggccgcggtctcctgcgtcttcctggccttcgtcatcgtgctgctggcgctcagactgcagcgctggcacaagtcacgcctgctgcaggcttcgggaggtggcttagcgagcatgcccggctcgcactttgtgggcgtggaaggggttcgggctttcctgcagacctattcccacgaggtctcactcactgcagactcgcgtaagagtcatctgattttcccccagcccaactatgccgacacgcttatcaaccaggagagctatgagaaaagcgagcctcttctgataactcaggatttacttgaaacgaaaggagaacccaggcaacttcaggtgagtttctttccgcctaagcgggaagagtaatctgatcttcccgcaacccaactaatcagacaggctcatcagctagatcggctgttatagaagcgaacctcttttggtacaggaagattcgtgattttgtaaagtggaagactcccttgttcaggtgagggtatcgtttttttttttttttttttttgagacggagtctcgctctgtcgcccaggccggactgcggactgcagtggcgcaatctcggctcactgcaagctccgcttcccgggttcacgccattctcctgcctcagcctccctagtagctgggactacaggcgcccgccaccgcgcccggctaatttttttgtatttttagtagagacggggtttcaccttgttagccaggatggtctcgatctcctgacctcatgatccacccgcctcggcctcccaaagtgctgggattacaggcgtgagccaccgcgcccggccgagggtatcgtttttattggttgacaggaaaattcaagattgtctttgattagtgcttagttttcttagccctttgcagagagtcacataattctaatgtttttcttttatatcaaaagaatgttctgaagtcttaattttgtgggggaaaataatgcatgtcctagtttttctttacctttctcttcttggcaaactatttgtgtcttggattgagtacatctcgtttcttaggttttttcctactatgtgacatttgtaaggttctttctttttctaatgtgggaaaaaaaataaccttaatttaggtcagtgttaaagatcaagatcttggttttagctagcatggtggttcacgcctgtaatcccacctcttcaggaggctgaggcaggaggatcccttgagaccaggagtttgagaccagcctgggtgactctgtctctaccaaaaagaaaaaaaagtagccagatgtgtggcgtacacctgtagtcccagctactcgagaagctctgataggaggattgcttaagtccaggggtatgaggctgcagtgagatataattgtgtcactgcaccctagcctgggagacagaatgagactttttctctctctctctcaaaaaaaaaaaaagattttgttttttctcagtgttacttgataactataaacgacagacgttcatacaagagatctttcacctttactacttaggaatcaaaaattatttttgaaaagataagaatcattggtaactgcagcaggggacaccagatctttggtgttaaaagacctgaataacattcctgtaactatctgttatttacttgggccagttacaatcgccattatcttccaattaaaattaagatttaaaagacttctcttatcagagataggatccccctctgttgcccagtctggagtaaaaatccacctgtaactgctgcttatagagtgtgtatccagggcaacttgaatctatgttcctgggttgcaatcctaaagcttggctcaaataagctctacttatattattttttaaaacaagactttccttatctatctgactcaaattctaagaaaataattttataactttttttcaaactctaaagcagcatagtgaacacgtatttgttgacatcaccattattataattattgggttgttaacaataactaagcaccgatgctgtgtgcctactacagtgtcttttgcatactgtgtgcctgatagtatttaagagtgaaaatggccgggtgcggtggctcatgcctgtaatcccaacactttgggaggccaaggcaggcatctcacgaagtcaggagttcgagaccagcctgaccaacatggtgaaaccccgtctctactaaaaatacaaaaattagccaggtggggtggcatgggcctgtaatcgcagctactcgggaggctgaggcaggagaatcgcttgaacccatgaggcagaggttgcagtgagccaagatcgtgccactgcactccagtctgggtgacagagcgagactctgtctcaaaaaataataatgataattaataaataaagagtgaacatgaattttaaaacatgctcggtagtgtctgcttacaggacatatctctaaaaatagatgactgactggtgaatgggagaacaaatgttaatgaggttcaaataaaaatttaaatattttagcattttaacccagacaataaggctttcatcatataggaactctttattgaaatatttcaagaaaaaagggattatcatttagaagactgattagtcttatttattatgactgaaatgtgcaaacagaatcattgtttcatgaacagaaaacagcagagtttttgactgtcaatgatgttcgaatagaaaatggatcactaaggagataggagattctgttatcgacagtcttcaaaagtaagttgatggccctggaatgaatggagtacaggggattctctaatttgatgacttgttgaactacattatagtcaagatttttctccagtcatgagttggaagattctacaatctggtggtattatagaatggattggccacttgtgcatctgaatttgttatgaatgtgtaagaaaaaagcaattgagaagataccttgaaaataaatgagaacctcctttgtaacctgactttgtcagtcttcttaaagataacattgagttgatgtgtttttaaataagctgctaagagtaatatgtgtttttctgaaccaatattgtggtatttacatttaaggaattgttatagatttatttatttcaagtttccaaaggtatatacctaaacaagagatctaatcatacacatcttcaaagctcattttcttgtatctttgtgatataatttgataaaataacaattttaaacaacttgaatcttggatattagtctcatgagttagatgggctgttatacatatgattatttcataaactctgaaagtgtgaatgttattttactatactaccaatttgggatgttaaactacatcttgagcatttgttgttatagggaaagctcactaactacttttcatggagatcaggctggtttattttattctcttattacctgtgaccatttcatttaaacaaataaaatatttctctgatggaaaaactaccaacttctactctcacaaaagtcattcactcatgtggactgaccaactgttaaacatcctggcagtcatggaatttgctaagttatggctaaatgaggttctttaatccacctgcaatacagatcattaataataagataggctatctgaggttttgagagttcagtatagaattttgaagcatcaggaaaaaaaactaccaaattattgtcttattcttattttatggtctgtgaaagcctcttttttttttttttttttttttttttttttgtcagagtcttgctctgtctcccaggctggaatgcagtggtgtgatctctgctcactgcaacttcctcctcctgggttcaagcgattctcctgcctcagcctcccaagtagctgggattacaggtgcatgccaccatgcctagctaattttcatacttttagtagagatggggttttaccatgatggccaggctggtctcaaactcctgaccttaagtgatccacccgcctcagcctctcaaagggctgggattacaggcatgagccactgagcccggcctgaaaggcattcatttctgatcaggcttctgttgaggtggcaattgtcaaaggggaaggagtaaaatctcagaggagaaacattggaagatacctatatctttgcttgagaatgaaaatctaaatggaacttcaaagaactgttttgttgtttgttttttagaaaaaaaagtcccaaaaaagaaaagagagaagataatcaattcgatgcccaggaagccaaatagactttacatagaattctttttaatgcaaccaaacaaatggtcaggattcttcccaatatctcagtcaacaataatatacactctttaaactatgaaatgatttcaatttgatacaatgagcttatgttagattttattaaacatatcttggcggtctagtaaagatctttaatatttaattttatgatgttcgataacttagaaaatgtgaatgctagagacaatgaagccatttactccatagggtatgtatgctttgtgttcggagtagtctataatttaatttaactagctcttatttccttttctccaaagaaggtaccaagacactataaattaattgagacttttttaaaacagtagaataagaaacaaatgtgagatgaaactatgaattttgaggcatcaggtaaaaatggatcaagacattgagagctataacctccaaacatgaaagtttgtttgaaaatatctacaagtgcttacattgtttaataatcatacactttgcttgcctcaacaagaagttcaaaagtactattaaacaaatagaatttaactccagtttacagaattcatctataatacctctattagttcctttaaacaaaatttatctactttgtgaatgcaaagataactatggattattttgatagatcaaaacagaatgtccttcaaagtgttccctgtattctggagcaatgccaccagaaagcagaaataggttacttaggagcctcccacaaaacgaagttaagctttcttagtgttagttctggattctcctcctggttccaccaactactctccaggacctagaagaatttacaaaccaagactgtttcttgccaggtctttattccagagcaggtcattctcttttattctgcaactatgtgaaaggagctttcttttctttctgctagcagagggtagcctcggatccatcaataatttagttttactctatcaacatcagtggagagacgagtacctctaaggatcctgtcaggacagtcctgcattttgctcaaatgctgtctagagatccctgttttctcaattacactagaatagagtaggatgaagatttgaattgcatactaggatgaagacttgaattgaattgcataatgaaaagaatcagccaatccattatccagtttcttatgaattcacagcccagtaggatctctgcagatttctgccttctgtagaaaatgggttgcttctatagctgattgctgcagccaagacaaacaacgatttctttctttttttctcacaagactgggagtgagaatatttggattccgacattgttctactactatataatcaataatcaggaacaaggcaaggcaattccctctttctttctttctttctttcttcttcttttttttttttttttttttttggcagagttttgctcttgttgtccaggctggagtgcaatggtgtgatctcggctcaccacaacctccacctcccgggttcaagcgattttcctgcctcagcctcctgagtagctgggattacaggcgcgcgccaccacgcccggataattttgtatttttagtagagacggggtttctccatgttggtcaggctggtctcaagctcccgacctcaggtgatccgcccgcctcggcctcacaaagtgtgggattacaggcgtgagcaacagcacctggccccccctctcattttttaaacggttaaaatgaaggtgttagaccgtctctaaggttctatacaatcaaaaatttattaaaataggtctatatattttacaacaattttgactttctgaatcttgcatcatggtgtctagaacatatgtgttcaattaatactgaattaattaaaatttatatacactgatgtaaatattttctaagtaaaatctttcatatgtatttaaataaaatttacctttttgccttcaataactgattttcccatgtgcaataacgtgtgagtcagtgcccaaaagagtcacttgaaagttgcaaggcaaagcagttttttaaaaattatctaagattatcaaacaccggtccatgaacactgttgcattaattcagtgtcttaaaatggatttttaattatcagggatatctagagcaaagaaatctaacagggaaattttgaaagatgaaacaattttctatgaaatcagtgtattgtgtgcatcaatgtggtgcagtaacttagtaaggactcacagcgccgctgttcaccaaccagggaaaaatggtgcgagagatcccacagaaaccaccgagttttacagcacagagaaacgacagattgcgataagccctcttccaggctgcactaaactcaagcctctatcctgctggattctgagctccccttcctaagacagaggggtccacccggatacacccgcattctgaagcacttcccgagatcggcgcctaagcaagagaagcaggacgactatggcggctcagccgaggggcggggactacagaggattcttcctgctctccatcctcctggggaccccctgggaagcctgggcaggacgtattctctactccgtgtcggaggagacggacaaagggtcctttgtgggagacatcgccaaggacctggggctggagccccgggagctggcggagcgcggagtccgcatcatctccagaggtaggacgcagcttttcgccctgaaccagcgcagcggcagcttggtcactgcgggcaggatagaccgggaagagatctgcgctcagagtgcgcggtgtctggtaaactttaacatcctgatggaagataaaatgaatctttaccctatagacgtggaaataatagatattaatgacaacgttccaagattcttgacggaagaaataaatgtaaaaataatggagaatacagctcctggggttcggtttccgttaagcgaggctggggatccagatgtgggcacgaactccctccagagttaccagctcagccccaatcgccacttctccctggctgtgcaaagtggagacgatgaaactaagtacccggaactggtgctggagcgggtgctggaccgggaggaagagcgggttcaccacctggtcctcacagcctctgatggcggcgacccgccccgatccagcaccgcccacatccaggtgacagtggtggatgtgaatgaccacacgcctgtcttctctctgcctcagtaccaagtaactgtccccgagaatgtgccagtgggtacaagactgctcacggtacatgctatcgacctggacgagggagtcaatggggaagtgacatattcttttcggaaaataactcctaaacttccaaagatgtttcatctgaactcgcttacaggagaaatatcaactttagaaggattagattatgaagaaactgccttctatgaaatggaggttcaggctcaagatggtcctggtagtctgacaaaggcaaaagtactgatcacagttttagatgtaaatgataatgctccagaagtgactatgacgtctttaagtagctcaatccctgaagacacacctcttgggacagtcattgctcttttctacctacaagacagagattctggaaagaatggtgaggtgacctgcaccattccagaaaacctaccttttaaattagaaaaatcaatagataattattatagattggtcacaaccaaaaacttggaccgggaaacactctctttgtataacatcacactgaaagccacagatggtggaactcctcccttgtccagggaaactcacatattcatgcaggtggcagacaccaacgataacccacccaccttcccccactcatcctactcagtctacatcgctgagaacaaccccagaggggcctccattttcttagtgactgcacaggaccacgacagtgaggataatgcccagatcacttattccttggccgaagacaccatccagggggctccagtgtcctcctatgtctccataaactctgacactggagtcctgtacgcgctgcaatcctttgattatgagcagttgagagaactacaactaagagtgactgcacatgacagcggggacccgcctctcagcagcaacatgtcactgagcctgttcgtgctggaccagaatgacaacccgcccgagatcctgtacccggccctccccacagatggttctactggcatggagctggcaccccgctccgcagagcccggctacctggtgaccaaggtggtggcggtggacaaagattcaggccagaacgcctggctgtcatacctcctgcttaaggccagcgagccaggactctttgcggttgggctgtacacgggcgaggtgcgcacggctcgggccctgctggacagagatgccctcaagcagagcctcgtggtggccgtccaggaccacggtcagcctcctctgtcagccaccgtcacactcaccgtggctgtggctgacagcatccccgaagtcttggccgacctgggcagccttgagccctccgacggtccttacaactatgacctcacgttgtacctggtggtggcggtggccacagtctcctgcgtcttcctagccttcgtcctcgtactgctggcgctcaggctgcggcgctggcacaagtcacgcctgctgcaggcttcagaaggtggcttggcgaacgtgcccacctcgcactttgtgggcatggacggggtgcaggctttcctgcagacctattcccatgaggtctccctcaccgcggactctcggaagagtcacctgatcttcccccagcccaactatgtagacatgctcatcagccaggagagctgtgagaaaaatgattctttgctaacatccgtagattttcaggaatgtaaagaaaacctgccaagtattcaggtgagcccagcccttcctttatttccatgaggaatttatttgcatgatatttctctattattttgcaaaacaaatgttttgaaaatagggatttaaaaaactttatagaggtaaaaatgagtttaccagtttccttcagtggtgacactttaatatagaacacataggatatagtatttctttagtgaaagcctatggacaagattatgaatatgtggactatcacattttataatttccacctactttccaatctatgttccaacctactttcttaactcatatattttatacattggaatgaatcgagtctttcatattgcacaaggttagcaggaataaaacacacctcagctgtcttctcaggattctctttagcattcaaatatgtaaaaggttctgaaagatttcttccatgtgaagatttttttctgtggctgattctgcctccatgtacctcagcttggtggtcctaaaaaatcttgattgcttcttgacctatttacagtataatcatttattaatggggtggtagtagaaggttggatttatgcctaaagaatgaaatgtgtgtgtatcacacttcactaagatctatatcaaagacagacatcaagtctaatgccacactaaaggccatcggacaaaaccaataaaatatgtcaaataaaatgtcattttaagtgttgtaattggcatttgtgacataggcaattacatgttttaacagagaattccagtatgttgttttagtggtacagccagatgaagtgtgtctgtgggctatcaaagtgggagattggggatactggctttgtttcaactgtctcacgtactcaaaccttagaccatcttatgtacacagatcctagaccagtagttgattttatttattaggtctactgaaaaattcagttggaaataacccaatctgggattaactacttccatattcttttgtataacattttagtaaagctcagtatatcaagtgattgtcatccagaaggggtggatgacaaggtaatcttgattccagagacctttgagtattaattaaaaacacacttttagccaggtatggtgttgcaagctgtagcccacctgcatgggaggctgaggcaagaggacagcttgaacccaagaattggaggcccacctagataatataacaagactctgtctcttcaaaaaaagactctttttagactagtgttgtatttggtagtattttgcacatgatagactctgtacaatagtgtgggggatacattttttttttttgacatggagtctcgctctgtcacccaggctggatacattttacaagttctgcagtgttcacatttcagatgtacaatcacttggggtagaagacaatgttgctgacaccaacaatgttactgagggaagatcctatggcagaactacggttataaggtattttgtaaaagaaaatctcctgaccaaaatttattagatgcataaaattgtttttaagcaatggagagacataatcactaaactcagtgagctattgcaatcaaactttccagggattgtttccttcaattcagaggtcaccaaggaatgtaaaataagtgcagaggtaggaagcagtgcttcagtgcagcagatctcagtgactttgtgttttgaggctatgtattatccccctgataactttgaagatgaatgttgtatttcataaccagtaaaataattgtgtaatgaggagaggagtaggctactgcctgtgatcatcgaaatgagaatcacataatattcctgtaatgaaatcactgaaactattgggaagggggtgtatttgaagataagtataaattgcaccttctaaaaggcaattttggtattactgatactctccggaaaaagttgaaataaatcaacttggaggtacttagaaaagtggagaaaatgttaggaacaatgaaagaaagataaaatgtatccagtatatttctaatgagtaagtatggaaaattactgtactctgagacggtttaggccaagtctgtgttatggctatctttatatagatagtgcatgtttgaagattggggaaagcttatgtcaataaatgtttatgtacttaatctacatgatttgcctaaaaatcctcaaagttgggatgaaggcattcctaagagtacatttttagacgtcattaaatatacagacgtatccacgtagtttttgttctttcagttaggcacacaattataattattgcactggttaacttgaagcagcagaggctgtagtttcctagtgctgactctgggcgccgctgttggccaaagtggagagcttggcgctccagatctcctcgcgcagccgcagcgcgctttccagggcagccccagctcagactccccagcgccagcctttacaccgcttcctcctcggaaaaagaagaattttttcttgaactggaactgcaactaaagtccgttcggagatccaaaaatctgcaatacagaggttatttgtaacccggcgtctccaggctggtgagcaagctgaggagagcaagagggatggggagcggcgccggggagctgggccgggctgagaggctgccagtgctctttctcttcctgctgtctttgttctgcccggcgctctgtgagcagatccgctacaggattcccgaggaaatgcccaagggctccgtagtggggaacctcgccacggacctggggttcagcgtccaggagttaccgactcgaaaactgcgcgtcagttcggagaagccttacttcaccgtgagcgcagagagcggggagttgcttgtgagcagcaggctagacagggaggagatatgcgggaagaagccagcttgtgctctggaatttgaggctgttgctgaaaatccactgaacttttatcacgtgaatgtggagatcgaggacattaatgaccacacgccaaaattcacgcaaaattcctttgagctgcaaataagtgagtctgcacagcctggcacacgatttatattaggatctgcccatgatgcggatattggtagcaacacactgcagaattaccaactcagtcccagtgatcatttctcactgataaataaagagaaatcagatggcagtaaataccctgagatggtattgaagacacctttggacagagaaaagcagaaatcctaccacttgactttgactgccttggactttggagctccacccctaagcagcactgcacagatacacgttctagtgactgatgccaatgataatgctccagtgttcagtcaagacgtatacagggtgagcctttcagaaaacgtgtacccggggaccacggtgctacaggtgactgccacggaccaggatgagggtgtcaatgccgagattactttctctttcagtgaagctagccagatcacccaatttgacctgaactctaacaccggggaaattactgttttaaatacattagattttgaagaagtcaaagaatattccatagttttggaagcaagggacggtggaggaatgattgcgcaatgcacagtggaggtagaagtcatagatgaaaatgacaacgccccagaagtgatattccagtctctacccaacctaattatggaggacgccgagctgggaacacatattgctttgctcaaagtccgtgacaaggattccagacacaatggagaagtgacttgtaaattggaaggtgatgttccatttaaaatattaacttcttcaagaaacacgtataaattagtgacagatgctgttctagaccgcgagcagaatccagagtacaatataaccgttacggcaacagatcggggcaagcctcccctctcctccagttccagcatcaccctgcacattggtgatgtaaatgacaacgctccggttttctcacagtcttcctatatagtccacgtggccgagaacaacccgcctggagcctctatttcacaagtcagggcttctgatccggacttggggcccaacggccaagtctcttactgcatcatggccagtgacctggagcagcgggagctgtcatcctacgtgtccataagcgcggagagcggggtggtgttcgcgcagcgcgccttcgaccacgagcagctgcgcgccttcgaactcacactgcaggcccgcgaccagggctcgccagcgctcagcgcgaacgtgagcctgcgcgtgttagtggacgaccgcaacgacaatgcgccacgggtgctgtaccccgcgctgggtcccgacggctctgcgctcttcgatatggtgccgcacgctgcagagcctggctacttggtgaccaaggtagtggcggtggacgcagactcaggacacaacgcctggctgtcctaccacgtgctgcaggctagcgagcccgggctcttcagcctggggctgcgcacgggcgaagtgcgcacagcgcgtgccttaggcgacagggacgccgtccgccagcgccttctggtcgccgtgcgtgacggtggacagccaccactctcggccactgccacgttgcacctggtcttcgccgacagcttgcaggaggtgctgccggatatcactgaccgccccgacccctctgacctccaggctgagctgcagttttacctagtggtggccttggccttgatctcagtgctcttcctcgtggccatgattctggccattgccttgcgcctgcgacgctcctccagccccgcctcctggagctgcttccagcctggtctctgtgttaaatccgaatccgtggttccccccaactacagcgaggggactttgccttattcctacaatctatgtgttgcacatacaggaaagacggagtttaatttcctaaaatgtagtgagcagttgagttcaggacaagacatactttgcggtgattcatctggggccttatttccactttgtaattccagtgaattgacttcccatcaggtgagtttcctttaagtataatttaatgctcattgcctacccatttctccatattcacaagaaaatatacatatttgcaggaaaatatataatttttagatgtcatggatcattttaggaaagttgtagtcagttaaaaagctgtcatatcattctacaaaggaggagtaaagtaggagcaattgtgtggcccaacatttgtttgttttttagccaagcttagatttataaagcaatgagggtgtggttttaaccacaaagtgaaagtgttagacagttgttggctctctcctaaaaagtgaatgagatttttcctatacattttccttcttgttgactaatatatgatgaatacttttttcagcttggatataccataaatataaaaataataaagccaaagaatttaagctaaaattcaacacttttcttaactaatttaactggtatggtctccatagtagtccactgttttgtttcctgtgttaacttcccttttgtttcaaaagctcttagaataaggagtcaactggatttttatgtccatggaccccttgtgattatatgcagtgtacgctgtgtgtgcgtgtgtgtgtgtgtgtgtgtgagagagatccttttacttagaaaaaggtctactatgctcattagaagatcaaaagcagattctccttacttgtaacataggagtttcaggattaatctgtattcaagctcattctatatccttcatcaaagaaaagacaatgttttgtgtctgttgtccctctcacacacagccctaatatataatgtgtaactgccttatctgcagccctaaactaatatagctagaggtcttctaatcattctcctacctctaggaaagaaatatagtcttgaaaactgccaatctggtgtgcatacaaaatatatacaaaataccaaggaacattatatgagccttttgctaggtatatctaagcaactgcttcagttaatggccactttacaaattgctgaaagaaggaaacgtctttcgattcttttttttttctttttttttttttgagacagagtctctgtctgttactcaggctgtagtgcagtggcacaatgatagctccctccagcctcaaactcctgggctcaagcattccttctgcatcagcctcctgactagctggaactcaggctcatgccaccagacctggctaatttttctgttttcagtagagaaaatattttctttcactaatttaactggtatggtttccattgtctacccagttttccatatgcataagaaaatatattcacaggaaaatataaagttttcagatttcatgagtggttttaagaaagttttagtcagtgaaaaaactatcataccagtcttcaaaggaagggtgaaataagttcatctgctacgttgcccaggctggtcttgaagggaaacagacttttttgtagtcatacttatcctttggcttcttagtaagtattatatagtcattactttttgcagttttttagatcaaagtgttaatgtaggtaaagttaattttagaatatatgtaaaagtcaagtctgctttaaatttaatcatctctttggtgaaagggatgggatggagctttgctttttatcatatattcatctgtacctttcaagtattcaaatagaaaaatataaacaatgtaaataaaatagcaaaacaatgtaatatctcataaaactgcaatggtaaaagcatttatcctattgaaattccacaatttttatttgaaaatattatcgacatgtaattcaagtggcatttagaagaataatttaaaagcaacaactctatagaaagcttgtaaaatgattaagtagtttaaaccaaataaaacaatttctgagtcagtcatctccagtaggtctattttagtctcaagataaattcatttctggtgacaactgaagttcttagttatttgttagtatatattggagacatttacaataaagcttagagcacaatgggaaatgaaagtatcatgttttttttaagaccaaatgtattgcagaaatgtgagtaatttaatccgatgctacaatctgatcattctgatctaatctgatcatttaataacactaaataaaaccttcatctcacattctttggctgtttcttttaaaatatgggtttacggataaatcaaataaattcaaaacaaagtaataagcaaatgatttttttttctcagtaatctagtagagtattacatttagaagtaatctgtatctcagtgcagtaactatttaggactgtaagcgccgctgttcacctactggaagacaaatgcaaccgaaaacactcagatctcacacctcacgaagacccgcagatgccacaaactaactgctggactgcagcgaaacccgacccctgtttggaggcactccaggtttccggaggattgtcatctccatagctgcggcaagaaactaaataagacccatttatgcacagtgaagattctgagaggattctgcagcaaaacaacaatggccgctccacagagtcgccccagacgcggcgagctgatcctgctgtgcgcgctgctgggaacgctgtgggaaatcgggaggggacagattcgctactctgtgccagaagagacggacaaaggctccttcgtgggtaatatctccaaggacctggggctggacccccggaagctggcgaagcacggagtccgtatcgtctccagaggtaggacgcagctctttgctctgaacccgcgcagcggcagcttgatcaccgcgggcaggatagatcgggaggagctctgcgctcagagcccgcggtgtctgataaatattaacaccctggttgaggataaaggaaaactctttggggtagaaatagaaataattgatattaacgataataacccaaaattccaggtcgaagatctagaagtaaaaattaacgaaatcgcggttcctggagcacgttatccactcccagaagctgttgacccggatgtgggcgtgaactccctccagagctaccagctcagccccaatcaccacttctccctggacgtgcagactggagacaatggagccataaacccagagctggtgctggagcgcgccctggacagggaggaagaggctgctcaccacctggtcctcacggcctcggatggcggcaagccgcctcgctctagcacagtgcgcatccacgtgacagtgttggatacaaatgacaatgccccggtttttcctcacccgatttaccgagtgaaagtccttgagaacatgcccccaggcacgcggctgcttactgtaacagccagcgacccggatgagggaatcaacggaaaagtggcatacaaattccggaaaattaatgaaaaacaaactccgttattccagcttaatgaaaatactggggaaatatcaatagcaaaaagtctagattatgaagaatgttcattttatgaaatggaaatacaagccgaagatgtgggggcacttctggggaggaccaaattgctcatttcggtggaagatgtaaatgacaatagaccagaagtgatcattacgtctttgtttagcccagtgttagaaaattctcttcccgggacagtaattgccttcttgagtgtgcatgaccaagactctggaaagaatggtcaagttgtctgttacacacgtgataatttaccttttaaattagaaaagtcaataggtaattattatagattagtgacaaggaaatatttggaccgagaaaatgtctctatctacaatatcacagtgatggcctcagatctaggaacaccacctctgtccactgaaactcaaatcgctctgcacgtggcagacattaacgacaaccctcctactttccctcatgcctcctactcagcgtatatcctagagaacaacctgagaggagcctccatcttttccttgactgcacacgaccccgacagccaggagaatgcccaggtcacttactctgtgaccgaggacacgctgcagggggcgcccctgtcctcgtatatctccatcaactctgacaccggtgtcctgtatgcgctgcaatctttcgactatgagcagatccgagacctgcagctactggtaacagccagcgacagcggggacccgcccctcagcagcaacatgtcactgagcctgttcgtgctggaccagaatgacaacgcgcccgagatcctgtaccccgccctccccacagacggttccactggcgtggagctggcgccccgctccgcagagcgtggctacctggtgaccaaggtggtggcggtggacagagactcgggccagaacgcctggctgtcctaccgcctgctcaaggccagcgagccgggactcttctcggtgggtctgcacacgggcgaggtgcgcacggcgcgagccctgctggacagagatgcgctcaagcagagcctcgtggtggccgtccaggaccatggccagccccctctctccgccactgtcacgctcaccgtagccgtggctgacagcatccccgaagtcctgaccgagttgggcagtctgaagccttcggtcgacccgaacgattcgagccttacactctatctcgtggtggcagtggctgccatctcctgtgtcttcctcgcctttgtcgctgtgcttctggggctcaggctgaggcgctggcacaagtcacgcctgctccaggattccggtggcagattggtaggcgtgcctgcctcacattttgtgggtgttgaggaggtacaggctttcctgcagacctattcccaggaagtctccctcaccgccgactcgcggaagagtcacctgatctttccccagcccaactacgcagacatgctcatcagtcaggagggctgtgagaaaaatgattctttgttaacatccgtagattttcatgaatataagaatgaagctgatcatggtcaggtgagtttagttctttgcttgcttttaatttccagatgaattttatttggcataaattatgttttgaaaaacattgtgaagatagttgaaaataatttttaaggtgtatcacagagttttgggtttattttggtggtgttactataaaattgaactctaatagtcataggttattgtttcatttgcttttaaacgacttggaaaagattgttcaaccattttaagccttccagtattttattcctattatcactcattcacttaagaagtagctacccgtccatactggtaattttgctattgtttgtgtgtgtgtgtgtgtgtgtgtgtgtgtgtgtgtgtgtgtgtgtgtgtatcccaaactagaacttcagaaaattatcaagaagtctaaagccttgttattagcttagcaaaagtaaaatatatctcagaatttttagggttatgtttagcatttgaacctgtaactaggctcttgtagatttcttcactttaaacctcttttctgagccctgtttctgtaccagtgcccttcaaaactttaatacttcttaccatccttcaaaacatgaacaaactttaaagatggatcttggtgggagatgagactggttactaaatattaagtatgtgagtcagtggtcacctgggctccatgcccatggagacatgaaatctaaagcctagaatgtccattgctcccccaaacaaaaaacaaaagcaaaaacattagatctgaattaaaatgtaattttaaactgttgaaagtgacttttgtaaaatatgtaagaacatatttcaatacaattccaattagctgtttcggttgtgcattgatgtgaagtggtgagaatgttgatattaagaaccaatgtttcaggtacacaagttctaaataagctgatcaattcaattaaagttattcagtcttggctggacacagtgcctcatgtctgaaatcccagcactttgggaggctggggcaggaggaccgcttgagccccgggggtttgaaactgcagtgagctatgatcatgccactgcactccagcctaggtggcagaactagaccctgtctctaaaaaaactattattaggccgggtgcggtggctcacgcctgtaatcccagcactttgggagactgaggtgggtggatcacctgaggtcaggagttcaagatcagcctggcaaacatggtgaaaccccgtctctactaaaaactacaaaaattagccaggcatggtggcatgcgcctgtggtcccagctactcgggaggctgaggcagaagaatcacttgaacccgggaggtggaggttgcagtgagcctcgatcctgtcactgcactccagcctgggcaacagggtgagactccgtctcaaaaaaaaaaaaaactaatattaatagtaaaaactcggtataggctatccattattgtattcctgcataccttcttgtagcatttgaataaagctaatacctgaattgattgttgtaaggtagaagtagatgacccaataaatgtttgttattaatgaaaaggacatttcctaaggattgtgtagtgttctactgtatggtgcatattcagtggagtgggagttaacttcatagtttgtgtaccatttggatgcacatttgagaggacaacatattattggcactttgcaattttaaaaactcggatgaaagttgccctggtaggaaagaaaatccttactctccctaaaaatgttggctagttgtttttattaatctgacaaatggactaaagaaggttgaccaatgtccacaaatttatgtaaatgaacttatgagcttcatttatccaattccaaagtcatttcagataggataataatgcaatccactagaatatccctttgtaccttgtattgcagaatagataagcatttccccaataactcttaagaatgaatttatgtactgtaaaagatatgacataagagaagtattttgagatatgaagaagagcaacgtagtagggtatatcatttcttagctacatcatatgggcagtatacttgaatgaatatttcctgaagtagaagagtaaagaaaaattatttttataaagaatgttaatatagtcaggaagaggagatgtttggggattggtataaaattgccacaactttacaaaatagttttaaatagtatagatttccctaatatgtgtaatataaaacactagaaatattggggagttggaaatcatagaaatgaacagaagaatgataaaattgtttccatagctaataaaaaatgaatttttgaaatcagtatagtatgaaggctctgagagcaagaactgtatcatattaattattatattgccagtgacaagggcaatacttagttctagctaagagttcaaggtatgtttgcagaatggtgaaagaatggaccaatgtatgcaggtttgtataaaaacccaacgtgatatttctaacaatttggaaaacagagaaagataccttaaagaagttgttataattttttattaagtatatggacgtaaaaacttggcttgttaagttaggcacacaaaaacaattactgcactggttaacttgaagccgcagaggctgtagtttcctagtgctgactctgggcgccgctgttggccaaagtgcagagcttggcgctccagatctcctcgcgcagccgcagcgcgctttccagggcagccccagctcagactccccagcgccggcctttacaccgcttcctcctcggaaaaagaatcgtttcctaaactggaactggaactaaagcccgttcggagatccaaaaatctacaatacagaggttatttgtaacctggcgtctccaggctggtgagcaagctgaggagagcaagagggatggggagcggcgccggggagctgggccgggctgagaggctgccagtgctctttctcttcctgctgtctttgttctgcccggcgctctgtgagcagatccgctacaggattcccgaggaaatgcccaagggctccgtagtggggaacctcgccacggacctggggttcagcgtccaggagttaccgactcgaaaactgcgcgtcagttcggagaagccttacttcaccgtgagcgcagagagcggggagttgcttgtgagcagcaggctagacagggaggagatatgcgggaagaagccagcttgtgctctggaatttgaggctgttgctgaaaatccactgaacttttatcacgtgaatgtggagatcgaggacattaatgaccacacgccaaaattcacgcaaaattcctttgagctgcaaataagtgagtctgcacagcctggcacaagatttatactagaagtagcagaagatgcagatattggcttaaactctctgcagaagtataaactctctcttaacccaagtttctcattaataattaaggagaaacaggatggtagtaaatacccggaactggcactggagaaaaccttagaccgggaacaacagagttaccatcgtttagtcctgactgccttggacggtggacatccacccctaagcggcaccactgagctccggatccaggtaaccgacgccaatgataatcccccggtattcaaccgagacgtgtacagagtcagccttcgggaaaacgtgccaccaggcaccactgtgttgcaagtgtcagccactgaccaagacgagggcatcaactcagaaattacttattccttctacagaaccgggcaaatctttagtctgaattcaaagagcggagaaattaccactcaaaagaaactggattttgaagagaccaaggaatattcaatggttgtagaagggagggatggtggtggactggttgcacaatgtacagttgaaattaatattcaagatgaaaatgacaatagcccagaagttacattccattctctacttgaaatgattctggaaaacgcggtgcctggaacactaattgctttgatcaaaatacatgaccaagattctggggaaaatggggaggttaattgtcaattacaaggcgaagtcccttttaagattatctcttcatccaaaaattcgtataagttggtaacagatggaaccctagaccgagagcaaaccccggagtacaatgtcaccatcacagccacagacaggggcaagccgcccctctcctccagcataagcgtcatcctacatatcagagacgtcaacgataacgctccggttttccaccaggcgtcctacttagtcagtgtacccgaaaacaaccctcctggggcctccatcgcgcaagtctgcgcctcggacctggacttggggttgaacggccaagtctcctactctatcatggccagcgacctagagcctctggcactggcctcttacgtgtccatgagcgcgcaaagtggggtggtgttcgcgcagcgcgcctttgactacgagcagctgcgcaccttcgaactcacactacaggcccgcgaccagggctcgcctgcgctcagcgcaaacgtgagcctgcgcgtgttggtgggcgaccgaaacgacaacgcaccgcgggtgctgtaccccgcgctgggtcccgacggctctgcgctcttcgatatggtgccgcgcgctgcagagcccggctacctggtgaccaaggtagtggccgtggacgcagactcaggacacaacgcctggctgtcctaccacgtgctgcaggctagcgagcccgggctcttcagcctggggctgcgcacaggagaggtgcgcacagcgcgtgccttgggcgacagggacgcggcccgccagcgcctgctggttgctgtgcgtgatggtggacagccgccactctccgccaccgccacgctgcacttggtctttgctgacagcttgcaggaggtgctgccggatatcactgaccgccctgtaccctctgacccccaggctgagctgcagttttacctagtggtggccttggccttgatctcagtgctcttcctcctggccgtgattctggccgttgccttgcgcctgcgacgctcctccagccctgccgcctggagctgcttccaacctggtctctgtgtcaagtctggacctgtggttccccccaactacagtcaggggactttgccttattcctacaacctatgtgttgcacatacaggaaagacggagtttaatttcctaaaatgtagtgagcaattgagttcaggacaagacatactttgtggtgattcatctggggccttatttccactttgtaattccagcgagtcgacttcccatcctgagttggtgagtttcatttatgtctattctttttcattacccacccaattttctgtatttacatgaaactatcgtacattttcaagtccaatgagttgtcttagggaagtcagagctgctcagaaagctgtcctaccattctttaagaggagcagtaaattgtgagtttttatgtcgcataaaagaagtagccttatagatttacaaagtagtgagagtttgctcttagcttcctctctagcaaaaacatttggtgcgtttttttgtcctctttctcaaagctaatgaattttacctattcgttgtctcattctttaacatgtttatattttattgtatgtagataaaccattaaatttaatgtatgtaatcatttaattcatcttttaaagcaaagaaactgctagtagatgtctttcttcactgatttcactggtagttttcatctctttcttatgttcctcatatatgctttcttattcctacctaatggatttatgattttttgaatctcctaaaattttattaaaaatactatatgttggctgggtgcagtggctcatgcctgtaatcccagcactttgggaggccgaggcggttggatcacatggtcaggagttcaagaccagcctgggcaatatggtgaaaacccgtctctactaaaaatacaaaaattagctgggtgtggtggcgggcgcctgtaatcccagctactcaggaggctaagacaggagaattgcttgaacctggcaggtggaggttgcggtgagccgagatcactccattgcattccagcctgggcaacaagagcaaaactccatctcaaaaaaaaggaaggagaaggagaggaagaagaagaaaaatactacatgttatgtgtatgagagagaaagagagagactgattcactgaacttagaaggtccaaatcatccaaataattttctaagtttatccaggttttcttggatgcaaaatccttttccacctctatataattaccagaagaaacttacaaaaaaaaggaaatgctattgcctgaatttctcttgctcggaatcctgacatattcttgaagaaggggaaaaagacaccggatttgtcttatcgtttggagctttaaatataaatgactggatgttttctcaacatccttgtaggatggaaggtgaatacaggattattccatttttaagacaaaaactactagtcttgtgtacatacaaagctcccattacatggtataagtcttttgcttggtttcccttagtatgtgattcagtaaatgggttccttacaaagtgctgagatttcttataataccacttacttttaacctttcagtagttttctttgttgtatattttgtgttctttttcccaaattattatataagtttaagtgatgcttagaataatgtttaagaccactttaaaattgcataatttattgatgaaggattaaaatagaaacttgcttttcagtgtatatgcatttgaatcattgaaacacagtctgtgcatgcattacatattcacattaaaaaactaagcatttttgaaatagcagaaaagtttaagcaattacaaaaatgtgaaaatttccaactttaatcctgttaatatttagcaatattaggcgagaacatctgtaactattgctgaattaatattacttttataatacaaaaatttaaaataaacgtttttccaggaattttatcatcaaaataaaccccagaaaataatttcaaagtggataatctatccttatatatgtattaatacaattatatattttacatttacaaatatataggtataaaaattaaaaatgaatgtacttccaaacaagattgcacataaaaattacttcagaaaattgttaagatacacagaaaaaattgaagcatcataaaaaggaaattataatagtttacatatctagaaatagagtgcaaagttctaccaagaataagaataaattaatattaagcaatggtttgtgattttataatacacttacagaaattttattccactttatttacaactcagatatctaaaaaatagattgcttttgaaatacaaatgcaagaaacaattggagaaatctaaaatcataattagaagagagtagtgttttctttatcagccatctgatataatgttacacatcagtgggtgtagtaacggcttaggactctgagcgccgctgttgatcaactctaagcgaaaatcaggactccatccggatttccagttctgcggctacacaaaacccggcagataccacaaacctgctcccaggctgcagcaaaactcagcctctttcttctaaggaaaagatcaccatactttgcagggtggaagaaagaacctgatgaagcagcgcgcacagagatccttttgagaaaattccaaagcgaggcagcaatggcagctccaaccaaatgccagctccgcggaagattagtcctgctatgctcgctcctggggatgctatgggaggccagggccagtcagattcgctactcagtgcctgaagagacagaaaagggctatattgtgggcaacatctccaaggacctggctctggagccccgggagctggcggagcgccgagtccgcatcgtctctagaggtaggacgcagcttttctctctgaacccgcgcagcggcaccttggtcaccgcgggtaggatagaccgggaggagctctgtgctcagagcccgcggtgtctggtgaactttaaagtcctggttgaagacagagtgaaactgtacggaatagaaatagaagtaactgatattaacgacagcgccccaaagttccaggccgaaagtctggaagtaaaaattaacgaaatcgcggttcctggagcacgttatccacttccagaagctattgatccggatgttggcgtgaactccctccagagctaccagctcagccccaatcaccacttctccctgaacgtgcagactggagacaatggagccataaacccagagctggtgctggagcgcgccctggacagggaggaggcaactgcccaccacctggtcctcacggcctcggatggcggcgagccgcgtcgctccagcacagtgcgcatccatgtgacagtgttggatacaaatgataatgccccggtttttgctcaacggatttaccgagttaaagtccttgagaacgtgcccccaggcacctggctgcttactgcaacagccagcgacctggatgagggaatcaacggaaaagtggcatacaaattctggaaaattaatgaaaaacaatctctgctattccagcttaatgaaaatactggggaaatatcaacagcaaaaagtctagattatgaagaatgttcattttatgaaatggaaatacaagctgaagatggtgggggattgaaagggtggacaaaagtgctcatttcggtggaagatgtaaatgacaatagacctgaagtgaccattacatctctgtttagcccagtgagagaagacgcacctcagggaacagtaattcttcttttcaatgctcatgaccgagactccgggaagaatggtcaagttgtctgttctatccaggagaatctatcttttacattagaaaattcagaagaagattattacagattgttgacggcccaaattcttgaccgagaaaaagcctcagaatataatatcacggtgactgcaacagacagaggaactccgcccctgtccacagaaattcacatcaccctgcaagtgactgacatcaatgataatccacctgctttctctcaagcctcctactcagtctacctcccggaaaacaacgccagaggtacttccatcttctccgtgattgcctatgaccctgatagcaatgagaattctagagttatttactccttggcagaggataccatccaagggtctcctctctccacctatgtctctattaactcagacactggtgtgctgtatgctctgtgctcctttgactatgagcagtttagagatttgcaaatgcaggtgacggcaagtgacagtggaagcccaccacttagcagcaatgtgtcattgagactgtttgttttggaccagaatgacaatgccccagaaatcctgtaccctgccctccccactgatggttctactggtgtggagctggcaccccgctctgcagagcctggctacctggtgaccaaggtggtggcagtggacagagactcaggccagaatgcttggctctcctaccgcctattcaaggccagtgagccagggctcttctcggtggggctgcacacaggtgaagtgcgcacagctcgggccctgctagatagagatgcgctcaaacagagccttgtggtggctgtacaggaccatggccagccccctctctcggccactgtcacgctcacagtagccatagctgacagcatcccagacatcctggctgacctgggcagtcttcagatccctgcagacctggaggcctcagaccttaccctctacctcgttgtggctgtggcagtcgtctcctgtgtcttcctcaccttcgttatcacgctgctggccctcaggctgaggcactggcactcctcgcatctgctgcgggctaccagtgatgggttggctggtgtgcccacctcacactttgtgggtgtagatggggttcgagctttcctacagacctattctcaggagttctccctcaccgctgactcaaggaagagtcacctgatcttcccccagcccaactatgcagacacactcatcagccagcagagctgtgagaaaaatgagcctttgtgcgtctctgttgattccaagtttcctatagaagacacccctttggttccggtgagttcattttttttctttctttcttttctttttttgttttttgttttgttttgtttttgagacagagtcttactctgttacccaggctggaatgcagtggtgtgatctcggctcattgcaacctccgcctcccaaattcaagcgattctcctgcctcagcctcccaagtagagtagctgggactagagtagagtagctgggactacaggcctcccaagtagaataactgggactacaggcacgtgccaccacgcccggctaattttttgtgtgtttttagtagagacggggtgtcaccatgttggccaggctggtcttgaattcctaacctcaagtgatccacccacctcagcctcccaaagcactgggattacaggcgtgagccactgcgcctggcccttaactttctattatagttagctttctctttaactgtctgtacttaaggtagtataagttgatatcagtgtgtttctcatcacttttcactgggcctaattgttgctccaacactgaaaggaggcatttattagttatatttgctgatataactttcatgttctcataataattaacctgctgtcaacgtaaaccatacttcatggggtagctctcagcctgcattgatgtgggctttttgggtagggttgcttcattggttgcagtggactcatatcataaaattcttactcctttttttttttttttaagagatgggggtgtcattctgttgtccagggtggaatgcagtggtgtgggtaaagcttactgcagtctcaatctcctgggcttatgcaatcctcccacctcagccttcacagtagctaggactgaggtgggagggctagcaagctatgttgcccagactggtctcaaacgatcttcctgcttcagtttcccaaagcactgggtgaggtgtgaaccacctcacccagcaaattcttactcctacgatcatttattcaggtcatactatgtttgtaagggtaaactgataaaaaggtaaatgtattcttcttagagaaacagctgaaagcccagatttattgcttctattcttccatttctatgacaggaaaacacctctttgaggttatatttttcagatcacaagtgtgtaaagtctgtttgtgtttacagatattttctgacgaagattcaaacttcagttatccacttccaaaccctagtaaaccaattttttccctttaatggtgaaagttgtcacatcttttattctcatatcttcaaaggtcttaatttcctaatgctttaatgttaaattatggagaatagtaggacattcttcttttctatagtatatgcttgctcaagagaagtttctaagactggacactgtgaaatgacaaaacaaggaattaaaaatatttctctcacttatatattatttctggctcaattctccaacttttgagtctagaaatgaacttgcatatcagatataatttaagaaaatattctcaggaactgctgggaagattctaaaactattttactgtttttagctataaggaagagaataatgtattatttaatgttattttaaacatagtgttgtttcaaatagtaaataacatttcacaagacatttgaaaataagctttgaagttgactcaaaattctatgctaaacatgtgatccatagatacactgatgactgctggcatttctgtggaaatgaagaattgttttatttgtttgtaattatttgggtttcagttgctttatttttaagaaaaaaaagctgaagtgtctgggaatcctttatgacatacagacattttaattatttcaaacacgttttcccccttaagtgggtagcaaaaaaaataaagcatacttcaggctcatatttttaaccatgcaacaagaaaattgttacaatttctgttctgaggagtagccttcatacttagtatttataaatattgaaatgtatgttaatttggggaaaacataacagatatccatgaaggcttgtatgtcatggtaggtagttactattcgataccacaaaaatgtctcttgcccttaaaaccagaacacgaggctcaccagacagatgactgaatggagtatggaaaatctttatttctgtttttcttaggctatgtaggacttaacttattgtgcattggtaacagattgtagaacataagctgaaagataaaattcttgaccttaatgtctcatcttaaaaagaagcattggttgacattctatatctcgtattacttaaaaataatgggggagcgcagtatatattaaacaaagattggctttgtggtgatcattgttgaaggtggggtgatggctatgtgaaggttcactatatatactccctactgttgtataagtttgaaattgtgcataatagatttatttaaaacacaaagcatagaaatatctactataatattatggtgagagcaaaatttgagggggatgtacacctgcattttcgaagaatatatacatttcggagaccgaattcaaaatgaaaaaccgggctgctgtcccgcacggagcctctgggcgccgctgtcggccagtgcagagcaagcgctgacgccggggatccgtcagcctctggcctgggattccctgcgcagccaacaacagaaagaagaaaaccagctcccacacagagcctcccggctgcgcagacctttcccagcacagcggattgccagctccgagacccgggactcctcctgtcctgggccgaatgctcttttagcgcggtagagtgcactttctccaactggaaaagcggggacccagcgagaacccgagcgaacgatgggagggagctgcgcgcagaggcgccgggccggcccgcggcaggtgctatttcctttgctgctgcctttgttctaccccaccctgagtgagccgatccgctactcgattccggaggagctggccaagggctcggtggtggggaacctcgctaaggatctagggctcagtgtcctggatgtgtcggctcgcaagctgcgagtgagcgcggagaagctgcacttcagcgtagacgcggagagcggggacttacttgtgaagaaccgaatagaccgtgagcaaatatgcaaagagagaagaagatgtgagttgcaattggaagctgtggtggaaaatcctttaaatatttttcatgtcattgtggtgattgaggatgttaatgaccacgcccctcaatttgataaaaaggaaatacatttagaaattttcgaatctgcatccgctggtacacgactatcgcttgaccctgccacggatcctgatataaacataaactcaattaaagattataagataaactctaatccttatttttcattaatggttagagttaattccgatggtggcaaatacccagagttatctctggagaaactcctagaccgggaagaacagagatctcatagcttgatattgactgccttggacggaggggacccaccaagaagtgccaccgctcacatagaaatttctgtcaaggataccaatgataaccccccggttttcagcagagacgaatatagaattagtcttagtgaaaatctgccccctgggtcccctgtgttgcaagtgacagccactgaccaggatgagggggtcaatgctgagataaactactacttccgaagcactgcccagagcacaaaacatatgttctcattggatgagaaaacaggtatgattaagaataaccagtcatttgattttgaagatgtagaaaggtacaccatggaagtggaagcgaaggacggaggtggtctctctacccagtgtaaagtaatcatagaaatccttgatgaaaacgacaacagcccagaaataatcatcacttctctctctgatcagattttggagaattcacctccaggaatggttgttgccctcttcaaaacacgggatctggatttcggaggaaatggagaagtcaggtgtaatatagaaacagacattccattcaagatttattcttcttccaataactactacaaactggtgacagatggagccctggaccgagagcagacaccagaatacaatgtcaccatcgtagccactgacaggggcaagccgcctctttcttccagtagaagcatcaccttgtatgtcgctgacatcaacgacaacgccccagttttcgaccagacgtcctacgtggtccacgtggccgagaacaacccgccaggagcctccattgcgcaagtgagcgcctctgacccggatttggggctcaatggccacatctcctactctatagtggcgagtgacctagagcccctggcggtgtcgtcatacgtgtcagtgagcgcgcagagcggggtggtgttcgcgcagcgcgcctttgatcacgagcagctgcgcgccttcgcgctcacgctgcaggcccgcgaccacggctcgcccacgctcagcgccaacgtgagcctgcgcgtgttggtgggagaccgcaatgacaacgcaccgcgggtgctgtacccagctctgggtcctgacggctccgcgttcttcgatatggtacctcgctctgcagagcccggctacctagtgactaaggtggtagcggtggacgccgactcgggacacaacgcctggctgtcctaccacgtgctgcaggccagtgagcccggactcttcagcctggggctgcgcactggggaggtgcgcacggctcgagccttaggcgacagggacgcagcccgccagcgcctgctggtcgctgtgcgtgacggtggacagccgccactctctgccaccgccacgcttcatctggtcttcgcagacaacttgcaagagatactgccagacctcagcgaccgccctgtactctctgacccccaggctgaactgcagttttacctggtggtggccttggccttaatctcagtgctcttcctcctcgccgtgattctggccattgccttgcgcctgcgacgctctctcagccctgctacttgggactgcttccatcctggtctctgtgtcaagtctggacctgtagttccccccaactacagtgaggggactttgccttattcttataatctgtgcattgcacatacgggtacaaaagagtttaatttcctaaaatgcagtgtgcccctacattccaatgaagacatggtttgcagtgtttctcctggagccttaattccacctcatggtggggaggatttgacttcacatcctgagactctgacttcggtgagtttctcttttttgtgtgtgatttatctaatagtctactagtttctcatattttaggcatactactttattttcatatctagaatcatatgtttaaaatccatagctttttacaatattttctcaatgttttttcaattatagttttcactatgtatttggttcataagttgctctatctttttgtaaaataatgtcaccagactgaagatattttgtctttgtcttttttttttttttttttttttgagatggagtctcgcactgttgcctaggctggagtgcagtggcgtgatctctgctcactgcaacctccgccttctgggttcaagcgattctcctgcctcagcctcccaagtagctgggattactggtgcccctcaccacagctaaattttttgtatttttagtagacatggggtttcactatgtcgaccaggctgttcagaaactcctgtcctcgtgatcctcccaccttggcctctcaaagtgctgggattacaggcgtgagccacaatattttgtcaagttctgactatcgaacagaagcagtggtcttggcatctaagaaaacaaacaagtaacctatctattcaaatttgcgaagacttagtgaatttacgatatcttatttatatatttttaaagcctaaaaatattcagaagacaggcccagtggctcacacctataatcacagcactttgataggctgaatcggaaagtatcacttgagcccaagaattgagaccagcctgggcaatatagggagaccccccatctctactaaaacaacaacaacaaaaaaaaacattagcagagtgtggtagcattcccctgtggtcccagctacttgggaggctgagctgggtggattgcttggtcctgggaggtcaaggttgcagtgagccctgatcttgccactgcactccagcctgggcgacagagtgcgaccctgtctctaaaataaataaataaatatgcaggcagggccaagtgtgctgtaatcccagcactttgggaggtggaggtggagaatctcttgagcgcaggaatttgagaccagcctgggcaacacagggagactccatcgctacagaacatttaaaaattagcagggtgtggtggcacatgcctgtggtctcagctactctggtggctgtggtgggagaatcgcttgagcccaggaagtctaggctgcagtgagctgtctaggtgacagagtgagaccctgtctcaaaaaaaaaagacatttctaagaaataaatgaaatactattgcctttgcactcagtctctgtctctgattctctgatagaagatttttgaagaaaaaagataaaatctttgaagagttctatacttggaaggcatagtgacataaacacttctgaacatcctgttctctgtgtgaaagaagtgaacttctataccctttgcatttgagggaacaattgctactgggttgatgggcacacacagttgaagatatgtgaaccactggactttggcctctgatacaaactgcctaagagaagagattatttatactggtattaatgctctgatgaaaacaggtcatttgacataaacacttacttgttaaaaacctatatcactacatctaactttgttttctaaaacttttagtacttcaaattctacgtatttcttttctcattacaatgcaaacagtttaatttgcaactgtaatatatgttcattttagtttgtgattacctgcttaatcatttaaataggtccatttaacttgtatccctgtaagataaagtatgttttacacaaaaaggttaattaaggctcagtaaaactattctagaagagtactttaaaaacctcttacacaatcctaagctaaataagtttaatgaattaagtagttacaattataaagcttcagagtgaattatctcatgagtttatttaatataatctttgtatgaatgtatactaaataaaattggcctattcaaatcacaattttaaattataagacttttctgaatttacctagacactaatatgacctaaaataagtattatttaccttttattaaagtgtgtacatttctgttgggaaaacgtgttgcaaatatatatttaaccaaacattatcttgaaatatttacaatattttcactccactttatcacacctcccctaagaaacctacatatagtaaattatttaaagataggagtggagaaaccaaagaatctatgtaaaatataataatccaacagaatagtttactttccattgcatgtatcacttgggtgcagtaacttcttaggactctgagcgccgctgttcacctactaggagagaaaacgcagccagagctcaatccggattctcagggcttcaactacacaagccccacaaaccggctgctgggctgcagggaagctcactccagaatttaaagtgcccaggctacagagacaccctgaagccacagaaagacaaaggaaccggttgaaacacacaacgtgtccagtgaggactttgcagaattctgtaaccagactacaatggccgctcaaaggaatcgctcaaaggaatcaaaggattgcagcgggctggtcctgctctgccttttcttcgggattccatgggaggctggagcccggcagatctcctactcaattcctgaggaattagagaaaggctctttcgtgggcaacatctccaaggacttgggtctggcgccccgggagctggcggagcgcggagtccgcatagtctccagaggtaggacgcagcttttctctctgaacccgcgcagcggcagcttgatcaccgcgggcaggatagaccgggaggagctctgcgctcagagcgcgcggtgcgtggtgagttttaatatccttgtggaagacagggtgaaactttttgggatagaaatagaagtaactgatatcaatgacaatgctccaaaattccaagcagaaaatctagacgtaaaaattaatgaaaatgtcgctgcgggaatgcgttttcctctcccggaagctattgatccggatgtgggcgtgaactccctgcagagctatcagctcagccccaataagcacttctccctaagagttcagagccgtgccaatggcgtcaagtacccggagctggtactggagcactccctagatcgcgaggaagaggccattcaccacctggtcctcaccgcctccgacgggggtgaccctctccgatctggcactgtccttgtcagtgtgactgtcttcgatgcaaatgacaacgcgccggtcttcaccttgccagaataccgagtgagtgttcctgagaatttgcctgtgggcactcagctgctgacagtcacagccaccgacagggacgaaggtgccaatggagaagtgacatattcattccgaaaattacctgacacgcaattgttgaagttccaactaaacaaatatactggagaaataaaaatatcagaaaatctagattatgaagaaaccggtttctatgaaatagaaatacaagcagaagatggaggagcatatcttgcaactgcaaaagtgttgattacagtagaagatgtaaatgacaacagtccagagctgaccatcacgtctctatttagtccagtgactgaagattcacctctgggaacagtcgtagcccttttaaatgtgcatgatttagactctgagcagaatggacaggtaacctgttccattttggcgtatctaccatttaaattagaaaagtccattgacagttattacagattggtgatacacagagcccttgacagggaacaggtatcctcttacaatatcacagtgacagccacagatgggggaagtcctcctctatcaacggaagctcactttatgctacaagtggcagatatcaatgacaacccacctaccttctctcaagtctcctactttacctatatcccagagaacaacgccaggggtgcctccatcttctcagtgacagcgctggacccggacagcaaagagaatgcccagattatttactccctggctgaagacaccatccagggggtacctctgtcctcatacatatccatcaactcagacactggcgtcctgtatgcactcagatccttcgactatgagcagtttcatgagctacagatgcaggtgacagccagcgacagcggggatcctccactcagcagcaacgtgtcgttgagcctgtttgtgctggaccagaacgacaatgcgcccgagatcctgtaccccgccctccccacagacggttccacaggcgtggagctggcgccccgctccgcagagcccggctacctggtgaccaaggtggtggcggtggacagagactccggccagaacgcctggctgtcctaccgtctgctcaaggccagcgagccgggactcttcgcggtgggggagcacacgggcgaggtgcgcacggcgcgagccctgctggacagagacgcgctcaagcaaagcctcgtagtggccgtccaggaccacggccagccccctctctccgccactgtcacgctcaccgtggccgtggccgacagcatcccccaagtcctggcggacctcggcagcttcgagtctccagctaactctgaaacctcagacctcactctgtacctggtggtagcggtggccgcggtctcctgcgtcttcctggccttcgtcatcgtgctgctggcgcacaggctgcggcgctggcacaagtcacgcctgctgcaggcttcaggaggcggcttgacaggtgtgtccggctcgcactttgtgggcgtggacggggttcgggctttcctgcagacctattcccacgaggtctctctcaccgcggactcgcgaaagagtcacctgatcttcccccagcccaattatgcggacacgctcatcagccaggagagctgtgagaaaaacgatcctttgtctttgttagatgattcgaagtttcctatagaggataccccattggttccagtgagttttattttcatttttacttttgttaaaaaaaaaaagattggtttttactttgaagtttgcggcatgatggtggaaagtgtaaatgctaaaacactgatgagtagaatttgatgtttattaaggttttttttttttttttttttttttttttttttactttctggtaaaattcacctagtctcaatcaaggcctatatatcataaggctttgttatgattagctttgcagaaccttgtagtttatagtgttgttgagtacaatattgacaattcctaagacagacttccatacagaagtgcctgtcaatttatatttcctcctgggtggtcacatattgaaactccagccccttaagcaaccctcttgttctgaaggcaggtctggtaagaataggtaagtatcagaaagaaatcacctctggaaacacaacccaaatccaagaatactcaatgcagttcttcccaaggagaagggcaataggcctttttcaaactacattttatatatttttcaatctatactttgtggtgatagttgcagttgaatatactaagtttttcattaatattgaattaacaatttatttataacaatgtatgcttagatttttccagccctatttataactgataacactgcagtatcctttttgcatacaattctctaatttcacactgctatgtggaagatatagcattttaatttaactttcattgctcaatagggatcctgaggaggctatagagggtgaaattaagaatatttgggattctgcttttgtcttttttgttaaattttctagtgactaaggctgaaagtaaatatgggttgggaagacagataaatttgtacatgttcccgagaacaggagcaagagatatatgacaaagctatttcagtggctctttaatgtataaggaggcaaacacctgaaactctgaaaactctgaaattgagaggcaaaataaacttagagtcaagaaagaaatgccatttctgcagatcagaatataaacaccaaccacagctgtaaaaaagaaaagaatatatgcaacgaagggaaattatataaacaaaggatcattggaggtactgatgagttcatttagttcaatgaaaatagtgacgtattaggtagatctcttaattttattactagtattctactaaatgtggtagtataaagtcaaaaagcattccgaagtttctcaagacccttataattccatgatttttttcaggtcagtcaacatttgttgaatgataggtctgtggaaggaaagcacactctttagggtcatagttattaactattaaaccattgaaactattattttatatttgtgttaatgagagtcaaaattattgtgcattcatctcaaataattctattattttgaaaaatacaggttttttttttaaaaaaaactgctcttgacattgtagctattgtgagaaaatattttgattataattatttaaaagcaatacaggacaccctggatgatggtaatgactagggcaatggttgcattccagtacttaagtatgaaataaggaattattactttctgggtgaatataggctagaattgaagacaaaaaaatttgttgcttatcttcagtacttccagcttcatagataattactcttaaaaggaacaagaatgactgcctctggatggaggaattggatagcaatgggccgtgggataggagacctataaaccttcatgctatattattttgtgcctttttaaattttgaagaaaaaatattcatttattcaagatatatgtaaattcagtaaataaaaagatatgatagttatgaccaagtggaaatatatttcctgatgtaaaaggaatcactgaggaaaaagattaaaatattttggctgtcaactcgtagtttaaaaaaaattccttgaaagaggtagagaaaagtcaagttgcagtcccacacagagcctctgggcgccgccgtcggccagtgcagagcaagcgctgacgccggggatccctcagcctctagcctgggattccctgcgcagccaacaacagaaaagaaaaccagctcccacacagaggctcccggctgcgcagaccttgcccagcacaccagattgccagctccgagacccgggactcctcctgtcctgggccgaatgctcttttagcgcggtagagtgcactttctccaactggaaaagcggggacccagcgagaacccgagcgaacgatgggagggagctgcgcgcagaggcgccgggccggcccgcggcaggtactatttcctttgctgctgcctttgttctaccccacgctgtgtgagccgatccgctactcgattccggaggagctggccaagggctcggtggtggggaacctcgctaaggatctagggcttagtgtcctggatgtgtcggctcgcgagctgcgagtgagcgcggagaagctgcacttcagcgtagacgcgcagagcggggacttacttgtgaaggaccgaatagaccgtgagcaaatatgcaaagagagaagaagatgtgagttgcaattggaagctgtggtggaaaatcctttaaatatttttcatgtcattgtggtgattgaggatgttaatgaccacgcccctcaattccggaaagatgaaataaacttagaaatcagtgaatccgtcagcctggggatgggaacaattcttgagtctgcagaagatcctgatattagtatgaattcgctgagcaaataccaactaagtcctaacgagtatttctcattggtggagaaagacaatcctgatggtggcaaatatccagaattagtattgcagaagactctggaccgagaaacgcagagcgctcaccacttggtactgaccgccttagatggtggggaccctccccgaagcggtactgctcagataagaatcctggtaatagatgccaatgacaaccccccagtgttcagccaggacgtgtacagggttagccttcgggaagacgtgcctccaggcacctccatcctgagagtgaaggccactgaccaggacgagggcatcaactcagagatcacttattccttctttggtgtggctgacaaagctcagcacgtgttctctctggattacactacaggaaacattctaactcagcagcctttggattttgaagaagtagaaagatatacgataaacatagaagcaaaagaccgaggatctctctcaacacggtgtaaagtaattgtagaagttgtagacgaaaacgacaacagcccagaaataatcatcacgtcactctctgatcagattatggaggattcccctccaggagtggttgttgccctcttcaaaacacgggaccaagactcaggggaaaatggggaagtcaggtgtagcttaagtagaggtgttccatttaagattcattcttcttctaataattactacaagctagtaacagatgaggccctggatcgggagcagaccccagagtacaacgtcaccatcgcagccacagacaggggcaagcctccgttatcctccagcaaaaccataaccctgcacattactgacgtcaatgacaacgcgccggttttcggacagtcagcctacctggtccacgtgccagaaaacaaccagccgggtgcctccatagcgcaagtcagtgcctctgacccagacttcgggctcaacggccgtgtctcctactctctcattgccagcgacctggagtcacgaacgctgtcgtcctacgtgtccgtgagcgcgcagagcggggtggtgttcgcgcagcgcgccttcgaccacgagcagctgcgcaccttcgagctcacgctgcaggcccgcgaccagggctcgcccgcgctcagcgccaatgtgagcctgcgcgtgttggtgggcgaccgtaacgacaacgcaccgcgggtgctgtaccctgcgctgggtcccgacggctccgcgctcttcgacacagtgccgcgggccgcgcagccaggctacctggtgaccaaggtggtggccgtggacgcggactcggggcacaatgcctggctgtcctaccacgtggtgcaggccagtgagcccgggctcttcagcctggggctgcgaacaggcgaggtgcgcatggtgcgtgctttgggtgacaaggactcggtccgccagcgcctgctagtcgctgtaagagatggaggacagccacccctttcagccactgccacgctgcacctggtgttcgcagatagcttgcaagaggtactgccggatttcagcgaccatcccacaccctctgactcccaggctgagatgcagttttacctggtggtggccttggccttgatttctgtgctctttctcctcgcggtgattctagctattgctctacgcctgcgacagtctttcagccctactgcaggagactgctttgagtcagttctctgctccaagtccggacctgtgggtccccccaactacagtgagggaacgttgccctatgcctataatttttgtgtgcctggggatcaaatgaatccagaatttaattttttcacatctgttgatcattgtccagccacacaagataacctcaacaaagatagcatgctactggctagcattttaactcccagcgttgaagcagataagaagattcttaaacaggtaagtatttaaaaatgtatttaatcctttttatattacaatatgccaatatattccaatatagtggtattattttaagattctagataacttcttcatagagttcgcaaaatataggtcaaatttatggttatcattattaaaacaaaagtttaaattaaatgcctcagtcttcctactattcaaagacattttaaagcaaactacatgggtaatctccggtgacatttttatgaagtaaaatacctttcggttaaaaatataaaatacaggtatatttttacggcatggtattttaattgaaaccctgatgctactcaatttttctcaagtatttcatcttcatttactcaataaaggaaccttgtaagaattatagttaggcatcctacctgatgattttatcgggaccgtattatttccacttccagaaatgtcgttcctttcagtcggttaaaatcaattggaaccaactacaacctacaagttttcagctccagtaatattttgaaaactttttaaaaattaagcaagcccttttaataattactcctttcgcaggtgttcttggtaaagttttaacgtcacataatgtaagtattgtgtatcatcgtttttaagctctacaaatacgtgtgattcacaaaggtgagcgtaatcatttcttctggaatttcttagtcgttgcaataataagaatgggctctaggcgccgctgctcaccaatcagggaatgggaagctgcgcgccattgagtccctccctcccccgcctctaccacacaaagcggaatgagatggatactcacagatcctgacactggagacttagaagtattttccttcgctttctgatatattttggatgtagtcggcctaggacttcatagatacataagccgattcacaaccaaccagctcgagaaaccgcggaatatcggcttagagcctgccatggcgaatcggctacagcgcggggaccgcagtcggctgctgctgctgctgtgcattttcctggggacgctgcgggggttccgggccaggcagatccgatattcggtgccagaagagaccgaaaagggctccttcgtgggcaatatctccaaggacctggggctggagccccgggagctggcgaagcgcggagtccgcatcgtctccagagggaagacacagcttttcgctgtgaatccgcgaagcggcagcttgatcacggcaggcaggatagaccgggaggagctctgtgagacggtgtcctcctgttttttaaatatggaacttctcgtggaagacaccttgaagatttacggagtggaggtggaaataatagatattaatgataacgcccccagcttccaggaggacgaagtggagataaaagtcagtgagcacgcaattcctggggcgcgatttgctcttcctaatgctagggatccagatgtgggcgtgaactccctccagagctaccagctcagccctaataattacttttccttgcaactgcggggcagaacggatggggccaagaatccagagctagtactggagggaagcctggaccgagagaaagaggctgctcacctgctcctcctcacagctttagatggaggcgatcccatccgaaagggcgcagttcccattcgtgtggtggtcctcgatgtaaatgatcacatcccaatgtttacacagtccgtatatcgcgtgagtgttccagaaaacatcagctccggaactcgggtgctgatggttaatgcaacggatccagacgagggaatcaacggggaagtaatgtattcatttcggaacatggaaagcaaggcttctgaaatattccaattggattcacaaactggagaagttcaagtacgggggtctctggattttgaaaaatatagattctatgagatggaaattcaaggccaagatggtggaggtctctttaccaccacgacgatgttgatcactgttgtggatgtgaatgataacgctccagaaataactatcacctcttctattaattcaattctggaaaactctcctccaggtacagtgattgctcttctaaatgtgcaagatcaagattctggagaaaatggtcaagtctcctgttttattcctaaccacctgccttttaaattagaaaagacttatggaaattattacaaattgataacaagcagagtgctggacagggagttggtccagagctacaatataacgttgacagccacagaccagggaagcccgcctttgtctgcagaaactcatgtctggctgaatgtggcagatgacaacgataaccctcccgtttttcctcactcctcttactctgcctacattcccgaaaacaaccccaggggtgcctccatcttctcagtgaccgccctcgacccggacagcaaacagaatgccctggtcacttactctctgacggatgacactgtccagggggtgcctctgtcctcctatgtctctattaactccaacactggtgttctctatgccctacaatccttcgactatgagcagtttcgagacttagaactgagagtgatagcacgtgacagcggggacccgcccctcagcagcaacgtgtcgctgagcctgttcgtgctggaccagaacgacaatgcgcccgagatcctgtaccctgccctccccacagacggctccactggcgtggagctggcgccccgctctgcggaacctggctacctggtgaccaaggtggttgcggtggacaaagattcaggccagaacgcctggctgtcctatcgcctgcttaaggccagcgagccgggactcttcgcggtgggggagcacacgggcgaggtgcgtacagcgcgggcactgctggacagagacgcgctcaagcagagcctcgtggtggccgtccaggaccacggccagccccctctctcggccaccgtcacgctcaccgtggctgtggccgacagcatccccgaagtcctggcggacctcggcagcctcgagtctctggctaactctgaaacctcagacctctcgctgtacttggtggtggcggtggccgcagtctcctgcatcttcctggtctttgtcatcgtgctgctggcactcaggctgtggcgctggcataagtcacgcctgctgcaggcttctgaaggcgggttggcaggtatgcccacgtcacattttgtaggcgtggacggggtacaggctttcctgcaaacctattcccacgaggtctctctcattgcggactcgcagaagagtcacctgattttcccccagcccaactatggggacacgctcatcagccaggagagctgtgagaaaagcgagccactcttgatagctgaagactcagctatcattttaggcaaatgtgacccgacaagtaatcaggtgagatttatttctctgcctcctaattgttggtgtcttggcacaagtcttttaaggagatgttttttgagcctgttatgaaaactgtttggggggggggtggggcggcatatatttagttcatatatatttagagcaatacatgtgagttttactttgcctttcatgagattacgataatctttcagaacgtttttgtgaaagtcatttttcaatcttggcatattttcttttgatttcaaaggggccattcaactatgctggtttggtttgaagtaagttgaattttagtattatttttctattatcagtgtatgaggctctcaatttattatatatagatacaaattaatgattcacaaacactttttatttccatttcaattttgctgtgccttcactgatttgtagttatattccaccattatttgctattactgctaatgttcaaattttgatcctgttgatttaatagcatgctccctctagctctccttctcatctatctatctatacacatgcacacacacttatacacgtaagcttttctctgagcaattttattttgattcttggtggctggtaatatgcttagatcctgttgactatttcaactttgtctcatttcttcatcctatcaacacagacatattgactggcttttaactactggatttccttgggagataaaatttagatcacattttttcttaagctctagatgtcttttccattactatggtgaagttacattgactgttctgaggaaataattgaattattgaactggtattatttccttttattcttttactttggtgtctgtgtttgtatgtatggaaggttttttaatgtagtaaatccatatatagaaataacttgattttgattcagtgcttctcaaaaacctattttcaaatgtgctaaagatgtctacagatttattcaaatagagtagtttgtgaatatataaatagattgaaggtatttggactttaattaaactgatttagctagtatccttctggctatttttttgttcattttcagtgtagttgggagtcatagattccttctttctttctttataaggtcattcttatggcaaatagtacattcagttcttttattcagaccaacttgttattgaagcttgatagttgcctgacatacatgttatctgaagcaatgtctaggaaagccaaatgaggaaaggagacttatctagggtttttgatcacaggaatcatttccataatcaattcagtcaacactctcacatcacttctaggtatttgccccaaattacttggatatttatgttccctttcaagtttagttttctcatttaggaatttaccttatgtcattagttgtaaactgactatctagggctcggacaaaaataatttcaactgtaggaaaggcaagtcttccaacagatgcctacatttttcttgaagtcaagaaaaatgttcaggtattttgagcatctagggataggatttatacttgtggaattccaaactgagaaaaatgatgtaaggcattgtactttgactggaattagttaaataaaaaggatatgaggtatttggctgggaaaaggagattgttccatattataaaacctcatctaaactaacttcccaagatcgtggagaacaaaaaggaagggttggctttgaaatgtgatattaagagggttatgttgattcggaggtagtgataaagttctgttaaggtataacatatagtcccattaaatagaggataaaaataaaacaccatcacatttcatgttattaattcctatggcaacctactaggctatacctttatattctctttatgatgaaacatgaaacaataatccttttcagaaacctcttttataagtgataagaagggtttggctaactttattctgaatatgccctatatagctttcagtgctcctccagttttctctgataaaactaggaggaaaattatctgcacatcagattgaaaataatactgcatatcatttcatagtggtcaaaattttcccataccacttgatggggatgttttcccacaaggtttttgttctacaacaggagagaagactttgcctagttcttccaatatgtgcattgcttctgcttagaaaaaaacaaacttttaaattctctttgctgggttaatgactgttctatagattcccatctctaaggaatcttctttggtagtaaacactggaaaacagtcactacgaaaactcataaaatgtctagtttcctatacattagtccaacacatcagtctaattctgaatcccattgaattagcaaaggcttccggctgcagttttctaaatagactcagagccctgctgttggccaatgtgctgcaagaactggagcctgggatctaccaggacgatattctgttcagtcacagaagcaagtcggagagtggccaagacttgggctttctgctcctgcaaatctgattccatacggattggggtgccctcaaactgggagcattgagttttctatgtatggaagtaaatattttaaaagcactttgtgaaacattttctcttaacgtcggagactgcagcaacgcatgggaaggatgggaaacagggtgaagcagagaagcaggacccggcagtggcaagcactcttccctttcctgctgcctttgttctgcggggcaccctcggagcagatccgctactctattccagaagaaacggtccagggctccgtggtggggaaccttgcggaggacatgcggctgcatgttcaggatttattgacctgaaaccttagagttagtgcagagaaacaatactttaccgtgaacacggagaatgggaacatacttgtgagtgacagaatagatcgagagtcactgtcttcaaaatcctctgtgtcatacccttagagattgtagcagagaatcctctaaatgtttttcacataaatgtgatgatagaagatataaatgataacccacctcattttccccaaaatagcattgttttacaaatcaatgaactagcaattccaggcattcggtttggcctggaatctgctatagatgcagatgtagggcctcactctctccagagttaccagctcagttctaatgaacatttctctctgatgatggacaagactaaaggcaagaacgctccagaattagtgctggagaagcccctgggccaggagcaacagagctctcatctcctggtcctggaagcaatggacatgggtgacccagtcccaactggcactgctgcaattcaaattgaggtcactgatgccaacgataatgccccagtttttagccaggatgtatacaaagtcagccttagagagaatgtgcccccaggcacctctgtactaaaggtgacagccactgaccaggatgagggtgtcaatgcggagatcacctactctttcaaatccctacgagatgatattggaaatatgtttgtgctagaccatcaaaatggggaaattaaatccaaagacttaatagacttcgaatttcgtagcagttataccatgagagtagaagctaaggatggtggaggcatgaccagcgaatgtaaaattatactagaaatcctagatgagaatgacaatgccccagacgtggtttttacttcagtgtccagttctgtaactgaggacgcagaaccctggacggtgatcactctgttcaaaacacatgataaagattcgagagaaaatggggaggttacatgcctcataaacgaaagagttccttttagaatcgaatcttccgccaataatgactataagcttgtaacagatgggaccctggattgggagcggatcccggagtacaacgtcaccatcactgccactgacaagggcaagcctccgctctcatccagcacaagcctcaccctacgcattggtgaagtcaacgacaatgctccggttttccaccaagtctcctacgtggtccacgtggccgaaaacaaccttcccggagcctccatcccacaagtcagcgcctctgacctggacctagggctgaatggccaagtctcctactccatcgttaccactgacttggagctgcgggcactgtcgtcctacgtgtccgtgagcgcacagagcggggtggtggtcgcgcagcgtgccttcgaccacgagcagctgtgcgccttcgagctcacgatgcaggcccacgaccagggctcgcccgcgctcagcgccaacatgagccggcgcatgttggtgggcgacctcaatgacaatgtgccgcgggtgctgtaccccgcgctggggcccgatggctccgcactcttcgatatagtgccacgcgccgcagagtccggctacctggtgaccaaggtggtggcggtggacgcagattcgggacacaacgcttggctgtcctaccacgtgctgcaggccatcgagcccgggcttttcagcctggggctgcacacgggaacctgctggttgctgtgcgtgacggaggacagccgccgctctctgcgccgctacgcttcacctagtcttcgcagacagcctgcaggaggcactgccagacttcagtgacagtcctgtgccctctgattcccaagcaaagctgcagatttacctggtcgtggccttggccttgatttctatgctcttcttcctcgcagtgattttggcggtcgccttgcacctgcgatgctcttccagcccctctgcctggggttgctttcaccctggtctctgttctaagactagaccaggggtttttcccaactacaatgagggaactttgctttattcctgcaatctgtatgttccctcggattctagaaaaagaagatttaattttctcaccatgacaccagaaacagtccccccacaagatctttctaatgaagtttctctggtagcaagcttcactgaagagaataacaagataagctctaactctgttgctcctactcacgtgagttccaatgaatgtctttcatttacaaatggatgaggtttaattttcaaaccaatattttggcaagaaaatcttaaacatattatatctactattgcttcaggtttgtttgcccactcttaatatttcctgttcctttctgtgtgggccagtaacttcattattagctttcatgtatttttgaaacattttcaccatttttacgggagactttttttttttttggacggagtctcgctctgtggtccaggctggagtgcagtggcatgatctcggctcactgcaagctctgccttccgggttctggccattctcccgcctcagcctcccgggtagctgggactacaggcgcccgccaccacgcccggctaattttttgcatttttagtacagacggggtttcaccgtgttagccaggatggtctcgatttcctgacctcgtgatctgcccgcctcggcctcccaaagtgctgggattataggcgtgagccactgcacccggcccggagacattgtttatacacacacacacacacacacacacacacacacacacgtgtgaaaagtgggtattatgatactgctgtcattgagatattttaattgaggaataaatttttttcctgtgatgtttcttgggacatcaatatttgagtatataaggctttttctttaatccattaactataaattttgaagaaaatgcatgagaaaatggagaaaatgtgttttttttttaaaaaaaattgagattaaggtctcattatgttgcccaggctggactcaaactcttgggctacagtaatcctcccacctcaatctccagagtagctgagactacagttgcctgaaactgtgcctggcagagaaaaaagcttaaaaaaataagaacatggtaatgatttgataatattcagttacatttacttttgattcttgtaattcaagtaaactcaattttatgtctgatattttctcacagctacctatatatttcttcccaatttaaaatatattattttattttatgcctagcaaatatctttacagtataaatatttacgctcatgaaagtacgtagccagttatttcttagggagaattttttccctatattttgatgggcttccaaaagtattaccagtaattctcagtaattacaattaggtcagttacccaggaaaaggtaagtctgtaacattctttggactaccaattttcttttactaagtttcctgaacaataaatatttttgaaatataatgtattaatagaattctggagtacttccattatttccagtcaatgcaagttggaatgcttctactttatgctaaaaatattaatgtttctttttcacttgggttcttgttaagtgtgattctgataatgtatacaatcacatatcatttttaggtttccataatatcatgaaaatttgatttttaagcgttacatgtcaacaacctggtaaagtaatccttccattcaggatcattcaaggaatctatttaaaaatattttccccaaattatagctgaatcagaaagtttaaattattatattatatgatttgtcaaaaagagaaactcctagggagacatctccataataggtgtgttgggggaacagtaatctcaaagcagatgcactaacattataagattaaaatcattgtttatagaaacttccaattcatttaaaagctcattggggaaaaaaaagctcattgggaaaaaaaaaaaaagctcactaaagtttctattaaagcgaatacggtagatttccatccccttttgaagaacagtaggtggagctatttaagatataaaaacgaaatatcctttctgggagttcaagattgtgcagtaattggttaggactctgagcgccgctgttcaccaatcggggagagaaaagcggagatcctgctcgccttgcacgcgcctgaagcacaaagcagatagctaggaatgaaccatccctgggagtatgtggaaacaacggaggagctctgacttcccaactgtcccattctatgggcgaaggaactgctcctgacttcagtggttaagggcagaattgaaaataattctggaggaagataagaatgattcctgcgcgactgcaccgggactacaaagggcttgtcctgctgggaatcctcctggggactctgtgggagaccggatgcacccagatacgctattcagttccggaagagctggagaaaggctctagggtgggcgacatctccagggacctggggctggagccccgggagctcgcggagcgcggagtccgcatcatccccagaggtaggacgcagcttttcgccctgaatccgcgcagcggcagcttggtcacggcgggcaggatagaccgggaggagctctgtatgggggccatcaagtgtcaattaaatctagacattctgatggaggataaagtgaaaatatatggagtagaagtagaagtaagggacattaacgacaatgcgccttactttcgtgaaagtgaattagaaataaaaattagtgaaaatgcagccactgagatgcggttccctctaccccacgcctgggatccggatatcgggaagaactctctgcagagctacgagctcagcccgaacactcacttctccctcatcgtgcaaaatggagccgacggtagtaagtaccccgaattggtgctgaaacgcgccctggaccgcgaagaaaaggctgctcaccacctggtccttacggcctccgacgggggcgacccggtgcgcacaggcaccgcgcgcatccgcgtgatggttctggatgcgaacgacaacgcaccagcgtttgctcagcccgagtaccgcgcgagcgttccggagaatctggccttgggcacgcagctgcttgtagtcaacgctaccgaccctgacgaaggagtcaatgcggaagtgaggtattccttccggtatgtggacgacaaggcggcccaagttttcaaactagattgtaattcagggacaatatcaacaataggggagttggaccacgaggagtcaggattctaccagatggaagtgcaagcaatggataatgcaggatattctgcgcgagccaaagtcctgatcactgttctggacgtgaacgacaatgccccagaagtggtcctcacctctctcgccagctcggttcccgaaaactctcccagagggacattaattgcccttttaaatgtaaatgaccaagattctgaggaaaacggacaggtgatctgtttcatccaaggaaatctgccctttaaattagaaaaatcttacggaaattactatagtttagtcacagacatagtcttggatagggaacaggttcctagctacaacatcacagtgaccgccactgaccggggaaccccgcccctatccacggaaactcatatctcgctgaacgtggcagacaccaacgacaacccgccggtcttccctcaggcctcctattccgcttatatcccagagaacaatcccagaggagtttccctcgtctctgtgaccgcccacgaccccgactgtgaagagaacgcccagatcacttattccctggctgagaacaccatccaaggggcaagcctatcgtcctacgtgtccatcaactccgacactggggtactgtatgcgctgagctccttcgactacgagcagttccgagacttgcaagtgaaagtgatggcgcgggacaacgggcacccgcccctcagcagcaacgtgtcgttgagcctgttcgtgctggaccagaacgacaatgcgcccgagatcctgtaccccgccctccccacggacggttccactggcgtggagctggctccccgctccgcagagcccggctacctggtgaccaaggtggtggcggtggacagagactccggccagaacgcctggctgtcctaccgtctgctcaaggccagcgagccgggactcttctcggtgggtctgcacacgggcgaggtgcgcacggcgcgagccctgctggacagagacgcgctcaagcagagcctcgtagtggccgtccaggaccacggccagccccctctctccgccactgtcacgctcaccgtggccgtggccgacagcatcccccaagtcctggcggacctcggcagcctcgagtctccagctaactctgaaacctcagacctcactctgtacctggtggtagcggtggccgcggtctcctgcgtcttcctggccttcgtcatcttgctgctggcgctcaggctgcggcgctggcacaagtcacgcctgctgcaggcttcaggaggcggcttgacaggagcgccggcgtcgcactttgtgggcgtggacggggtgcaggctttcctgcagacctattcccacgaggtttccctcaccacggactcgcggaagagtcacctgatcttcccccagcccaactatgcagacatgctcgtcagccaggagagctttgaaaaaagcgagccccttttgctgtcaggtgattcggtattttctaaagacagtcatgggttaattgaggtgagtttatatcaaatcttctttcttttttttttttaattgctctgtctcccaagctggaatgcagcggtacgatcatagctcactgcagcctcaaactcctaggctcaagcaattatcccacctttgcctccggtgtaacagggactacaggtgcaagccacctactgtctgcctatctatctatctatctatctatctatctatctatctatctatctattactttcttgtacagacaggagtctcactatgttgagcaggctgatctgaaacttgggctcaggctagcctcctgcttctccctcccaaactgctgggattacaggcgtgaaccacagtgccccgcccttatcagatattcttttctggctgggcgcggtggctcacgcctgtaatcccagtactttgggaggccgaggcgggtggatcacctgaggttgggagtttgagaccagcctgaccaacatggagaaaccccgtctatactaaaaaaatacaaaattagccgggcgtggtggtgcatgtctgtaatcccagctacttgggaggctgagtcaggagaattgctttaacctgggaggtggaggttgcaatgagctgagattgtgccattgcactccagcctgggcaacaagagtgaaactctatctcaaaaaaaaaaaaaaaaaactttatcctctagtttcatccattgatgacacttgctttaatcacttattacaatcacctccaaatgaagattttataattccattgtttcttctacagttgttaattggctttctaccttgaagaagagttttatattctctatatatgtttgtttctatgattctggaagcatggttttctattttattcaatggcctgtaatctgttaatatcaattatttattttgatgctgaaattgtcccaggattggcctttgggactccctttaggctgatttctatgtcctttctgttacagcaagcttgggattatatccaagatttgtaattccaatgtacttacttctgtcagtgtaaacaaagtacgatttctggactagatgacttgggcattgtgggggaggtggaaattagaggtattctctgtttttcctgtaggatcttgcatttcttcctcttgctgcttgtctctttgtgtcgggaacaggccccccaaaatctggccataaactggccccaaaactggccataaacaaaatctctgcagcactgtgacatgttcatgatggccgtaatgcccatgctggaaggtagtgggtttaccggaatgagggcaaggaacacctggcccgcccagggcagaaaactgcttaaaggtgttcttaaaccacaaacaatagcatgagtgatctgtgccttaaggacatgcccctgctgcagataactacctcaatccatccctttatttccgcccatctcttcgtttcccataagggatacttttagttaatctaatatctatagaaatgatgctaatgactggcttgctgttaataaatatgtgggtaaatctctgttcagggctctcagctctgaaggctatgagacccctgattccccacttcacacttctaaaaaaaaaaaaatttttttttctgagcttggagaaatatatcccttagtacacttggcatttataaagcagacatcaataaatttatatatatgtgacagataccaacaacaatccagtccccttccctcataccttatttatgtacatatattttatataatagatataatttattaacaatttataaaattactttgttaatactctatatcattttctagctgaatttatcaatgataatgctcttttcccacttttatttttttcccattgaccatgcagcagttttgtgtagaccgtctgataacaactgatctgtttatctaggggggagaaatctaattcaatggaaaatataaataaaattgtgataaacttttgtaaatagagtggcttttaactacacttgagatggctagcaaattcataaagtgaatttactttctttcaaagttcagtaattctttctggccattagggatatgtccatttatactttctcagtatcccaagtcatttcatggttttaaatcattcatgaacttccaaatatagtgaatttatttcttctgcatttaaaattttatcacttaaatatacaatataccgtattgccatgacgaaaaatggtaaagactatttttcacttctgttatgcatttcattaatacgatatctgtatgtgtttccaagttagacatttcttttgcccatttcctacactaatgatactaatgatgactttgtggaatattcagaattaacaaaatgtgttttgagtgctttttttagtactggggcaaatttgcagtaatatcgcctgctttttacattaaattccccataacttttacaactatgggaaaatttctgaaacgtgcacagattccaagtgttttctgagaactttatgcttattgtagagtggttacagacactgaatgctaaagtgtattactctttgaaaagcattgcttgatttcttttggtgaattctgtaaaggtgcagggaaacataacgtcccaattattttttctttcttctttgtttgctgcctatctactttgaaagatacaatagttaaaacccagaaaagagattggaaaccccttagagaatgaaagacatccaagggctctaaaatgcggcagttgctgcttctgagaccaaaaaagggggcaaaatatagagtgtgtggttctacttgtgtgattttttgaaagaaagtatttgaatttatctaaaaatactaaatttgtatttacattagttttcaaatagaatttaataagtacagtgttctataggtaatattgagagaaatagaggacaatgaaacctctctcctccatcatcttgtatgaactaccaaaatgtttatcatatggacagttctcatatatagtcaaatagaaagaaagacataataggaaaacaaatgacttgggaaactaagctaacatggtctaattattctgacctctgctcacctaacttgatttaggaacaaatcattgagagttagagcatgaatagtcaagactgttagaccatatctcaaatatcagtgacttcaatcaactatgtttccagtttaagctgaataggctttattaaatagttgttgaatgaatggataaacaaataatgtactctggggattacctgataccaggattctgaattttcagatgtatcatagaaggatagcagctttgcaattaggtaaattgttaactgtgtcacctttagcaagttatttaatctctttgagcttcagcaaagtaggaataatcatatctaatttgaaaggtcgtggtgatggctagggctaacaaaaatctgattcacaacatgcaattaattaacagtagccatttttagtggttgaccaaaaaaaggatttatattttcaatgccagcacactcgatgttctgttgggaaaaataataatgatttttgtgtgcttctccatatggtataatggaatgatttgtggatggaaataaaactgttctaaaatttttgtgacagctggtttaaaaatcttaagtgcctaggcacattcttgattgagaagccacagttttaggccataaaagatgggggaaagatttttatatgagacaattttgtgagtgttactttttctttgtctgaaccatagtgaaatctaaacaaggatcttgtgaaacttattttaaagaagcagtttacttcaatgggatcttagataatttcaccagaaaatggatcaccgaaaccagaaggctggtgatcattatttggtttgggccatataagaattgaaactaacggcttagctttaggatttttaggacacttgttgataatttaggattcataattaacatatgtgttgattgttttctgagactaactgggcaatgggtttggatgtgtttacatttattctgattccagtcataaaattatgtcaaggactttccttgtctttttatgtgtatgacagatgtgtatgtatccatttcatctaacaagttaaagcgttcagctataatttaaaatttgtagcttcactgttttatagtacctaaaattggaatgtaatcagtcagaagacattcatccactgctttcattccagaagtattatgctttttgaagcagcaatagcataggaatgttgaggagactatactatacttttatagcatatttaatctcgtagatcacttttcaatgaattataaggctgatgacaaatgagcaaattgtatcagttttctttatgacatgtaacagagtatagctgtgatcatgaattggatagttctggtgtaaaaatctgctttatccccatataagatgtcaggttcagaaaagcaaacacatagtttcgaagagatgttgatcaaactgatgaggctaaatctcaagaaagagacacagttaccctctaatgttacactttgagttcacctttttttttttttttgagacagagtctcaatctgtcgccaagctggagtgcagtggcactatcttggctcactgcaacctctgcctcctgggttcatgctattctcctgccttagcctcccgagtagctgggactacaggcacacgccaccacacccagctaatttttgtatttttagtagagatggggtttcaccatattggccagaatggtcttgatctcttgatcttgggatgcacccaccccacctcagcctcccaaatagctgagattacaggtgtgagccaccatgcccgaccactttgagttcacttttaagaaaccatacttaatggaaaattaccagtaacagggcatactgtttaggatgcattcctaaaatattaatggcaaaagatagccagcctatggcaaagctaattggaaaaaatattttataaaggatgagacttctggataccatatgggaagggctctggttcaggaaaatgtttttaaaaaactgtcattgaagagaccatagaatcaaacaaaataatttaatctgtatgtaaaagaagttggtaccaccataatttttcttatacatgtcatataaggatctactctgtgtattgtcattgagggcagatataatttcttagttcatcattaactctctgaagtatttcacacagtagtttgtacaccttctaagtactcaatacaatgcttgagttcaattattggaaagtggtctcttggagaaaaaagaatcatagtgcaaaaccaattattttacatggacttttcctctatatctaagccctaataagaggcagctgtctgatatacatacatacatacatacatatatatatatatatatatatatatatatatatatatatatatacacacacacacacacatatatgtatatatatatttggagtaggggatggagtcttgctctgtcacccaggctggagtgcaagtggtgtgatctcagctcactgcaacctctgcctcctgggttcaagcgattctcctgcctcagcctctccagtagctgggattacaggcgcctgtcaccatgcccagctaattttttaaaatatttttagtagagacagagtttcatcaagttggccaggctgctcttgaactcctgacctcaggtgatccacctgccttggcctcccaaagtgctgggattataggcatgagccaccgcaccctgccaactgtctgacttatcttaaaaggctaaggacctggtttgtttgtcaaattttgaaaatagatgcctcagttcataagatttccatattgtgtggcaggcgcctgtaatcccagctactcaggaggctgaggcaagagaatcacttgaacccgggagacagaggttgcagtgagctgagatcacgccactgcactccagcctgggcgacatagtgagactctgacaaaaaaaaaaaaaaatccatatgtgaaaattcttagaagcttcctatacaatttcagctgaagattcagccaacagttcattctgagactgtgttccatggaaaaagtaaagcccaggcatggaagtgggaatggaaagaaagattctaagcctacaaatactcaaacatcaagaagaaataaaaataagtcatcacttcgacttcatgtgctaacatcactgaggttataaattcccaggaatattttattgcgggagcaagactgcactgctgcctttcagcttgcaaattccagtgagaaacgtctttctctctgctctcaactaactctacagaacgctgtcctctcatttcttcaggctgcagttctagagtagggactcagagtgccactgttggccagtctggaaacagagataaatgagccaatccccagacattccggcttggtggcttttctaatttcatggaatgcaaatccaagagcagacccacaacattcctattatggctcctagttctacaaattataagcaggaacggaacggatttacaggcaatgagttcagctccttcttggctggagattctataatccaagaagagtttgaaaaggggcttatttgggctggagcagcagcaactctaactgtggaaaaggtggggaatggtgctggactgacagtctgggtagaaccaaggcgactactgcctcctttcctgctatttctatcctgctgggcattctctatgatgcagatccgttattcagtcctagaggagctggccaagagtttggtggtgggaaaccttgccaaggatctgggactcagtgtcgaggacatgcccacttgaaagcttcgggttaatgctgaggaataatacttcattctaagtggggaaagtggagacttacttgtgaatgactgaatggatcaggagcagatacgccccccaattatagcttgggccataacgctttgaaatagttgaaggccaggcatggtggctcacacctgtaatcccagcactttgggaggccgaggcgagcagattacgaggtcaggagttcgagaccagcctgaccaacatagtgaaaccctgtctctactaaaaatacaaaaattactgggcatggtggtgcaggcctataatcctagctactcggggggccgaggcaggagaatcgcttgaacccgagaggcaatcgcaccactgcactccagcctgggtgacagagcaaggcgccatctcaaaaaaaatgaacaaacggtagttgaaaattctttaaatgtttttcacattaatatggagattcaggatatgaagaatcatgcaccacggttcagcaggaatgttattaagttacgtatctctgagtttacccagctggaacaagatttgcaacagaacctgcagaagatcctgatgttgagagaaattccttacaaaattatcaccttagcagcaactctatatttctctttgaagtaaaagtgaccaacagtggaaagacatatgttgatcctgtgttagagaagctgcttgactaggaaaagcagagctcccatcccttagtgctagcagccttagacggccccccaacaaagcagcatcactcaactcctgatcctattggttgaagccaatgacaaccctgtgttcatctaggatgtgtacagcgtcggccttcaggaagatgtgcatccgggcactcctgtgctgagagtgagggccaccaaccaggactagagtgtcaaggcagagatcacatatggcttcacaacccagagtacccatatctagtttggccttgatcaaatagtggagaaatgaaaactttaagtacattggacttttaaagatttttaatttccatggttttggtagcaagtgacagagagggactcattgtccagtgtacagttgagaccgaatttctagaagataatgacaatatcctagaggcgatttttacttctaattccacaatgattcccaaagattctgcaccttggacagtaatcactgtccaggatttaaatcacaagatctttaaatcacaagatctggattcgggagaaaacgaggtcacatgtctgatataagaaaatgcaccttgagaaaaatcttcctccaataattaactacatgcttgtaacaaatggggccgtggaccaggaacagacccaaggtataacatcagcatcactgccactgacagaggcaaaccaaccctctcgtccagcccaagcatcaccctactcattggcgatgccaacgacaatgctctggttttctaccaggcctcctacgtcgtccacgtggccaagaacaatcttcccaaagcctccatagtgtgcaagtagacacctccaacctagacttgggacccaacagccaagttccctattccatcgtggccagtgacctggagccacaggcgctgtgattctaggtgtccttgagcgcacagtgcgccttcgaccaagagcagccgcgagccttcaagctcacgctgcaggcccgcgaccaggactagctcgcgctcggcgtcaacgtgagcctgcgcgtgttggtggacgacctgaatgacaacgcaccgcgggtgctgtaccccagctctggagcgcaatggcttcgcgctcttggatatggtgctgcacgccgcggagcctggctacctggtcaccaaggtggtggctgtagacgcagatgtgagacacaatgcgtggctgtcctaccacgtgctgcaggccagcaagcccaggctcttcagcctggaatgcgcaccgacgaggtgctgacagctcgcacgatgggccacaggaaagcgactcgccagcgcctactggtcgcggtgcactgcggtggacagccgctcctctcgctaccgccacgtcaccaccactaccgcccctcgtcgccgacagcctgcaggagactctgccagacctcagcgatcactctgcaaagctacagcctgaatccaaaattaatttatatctggtgattgccttagctttaatttcctttttattcttcctgattgcattgtttgtgctggttttaaagtgccgaagaccccaaaatgatcctgtctgagtctttcccacggatgtctatcccgcgctaagccccaggtttctgggtaactgtagctctatgatgccatattcctaccaggtgtgtgcttctcctacgaatccagggctgagtgaacttcttttttgaatccctacccctcaggactcaatagcagtttcactgcagaaagccccttggggaaggggatgattgtgattattctaattgcttgggcagaatccactctccaaggtgaaaaattcttgatgaaactaagttcagtcacaagcaggttttcttctagcattaaatattttcagagatctcagtaaaaagcatttctagcagcaagaccaaaggcctaagatgagaaatatttggcatggtgagcttgagggacagtagtcaggcagacaagagtatcagacatgccagagcatttggggcctgtaggtaaggagcatgttttgattatatatatttgtatgtgtttgattatattttataattttactttgatattcaaattgtactgatccaaaaataagggagggacaaatcttggccattgtagtatgagagatgtaaatttacaactcagaatccctgcttatcacttctccttcagcacacaactgtttcattttctatttaagaaacttcctctcactgcaaaaagacattctggctgataaagttagcctataatttcagtaaatctaagaatatgactaatggaagttgccagacctaaactttgaaaattattgttccactgaagagcgtcttatgactgagtgttccagtctccttctcaagctgaaccttgcttttcaaaccagattaagaacactatcataagttatactgcattttatttccctacccatgtccactgcatcattctctatagtacaaagagcttgtctcgccaggcgcatctataatcttagcactttggggcgccaaggcgggtggatcacttgagcccaggagtttgagaccagcctggacagcatggcaaaaacccatctctacaaaaaaaaaaaacaaaaattaacaaggtttagtggtccatgcctgtggtctcagctacttgggaggctgaggtgtgaggatcacctgagtctggggagattgaagctgcagtgagctgtggttgcgctcctgtactccagtctgggtgacagaattagaccctgtcccaaaacaaacaaacaaataaagagcttctctccttatgacttatttaaagcttgggaaattgttccaattcaaatgctttaaatggacttgagctaaaacagaatgtggtatatgaaatgttcttataatcaggtgattgtaaaaattgatccagataatgttagcatagcattttactgaactagtagtttacaaacacttcaaaaattatagaataacatttgcatataaaattcctcatacatttccctatcagtgaattggaagcttacaatatacaatattaccaaaaagacaaaaaaaatgaaaaggaaacagttacctttggaaaacataattaggtaaaatgggtaatatggaaagtctgaaaactgaaaaaattactgataagtcaagagaaaaggaatattagtaggaaaattcataaaagtgtgtctgactactcacagcaggtttccttattggtatgtattctgtggtccatctaagctatgttaattttattttaaatgctacctgggtattggcttctaaaaggaattcagtaaatcagataatttggcatcttcaatctagattctgatgctcacctgaaaagtctgctaaggattggaaaccaagaaaagtgaagtatctcaacagatatgtgtcacttgtgtgtactggattttttttttttttttttttttttttttttttttttgagatggagtttcactcttgttgcccaggctggagtgcaatggcatgctctcggctcactgcaacctccgcctcccaggttcaagtgattctcctgcctcagcctccctagtagctaggattacaggcatgtgccaccacgcccagctaattttgtatttttagtagagacggggtttctccatgttggtcaggctagtcttgaactcccaacctcaggtgatcttccctccttggcctcccaaagtgctgggattacaggcatgagtcactgcgcccggtcgcgtactggatttatattgtgtaatactttgctctagcagtatagtaggtgagacagtgactgtgtctagtgagcaaaaggcacttatttgacacttttgactcttcctttctacttaccttatttaaaattgatttttgcatgtggcatgatgcaccagttcattgaggtaggggttgaagttatttcccatttttttcaataccatttattaaaaatattttcctctttctgttgaatttgcttggtgcctttgttgaaagtcatttcactgatatatgtagttctatttctatattcttgatcatgtttcatttgtctattcttttactaatagcacactgtctcaattattgtagctttatagtaagtcttgctacaaagtcttactacaggacaaagcttgtaggatttttgaatgggatggcattgcatctatacctttatcagggaaagagggaaggagggaggaggatcatcttaacaatattgacacttcaaatccatgaacatggtatatatttccatttaattaggtctttaatttctctcagctatgttgtatagttttcagtgtagagaggtcatgtatatttctcattaaattgtccctacatatttgatgttttctaatgttattgtaaatagtatttttaaaattgtatcttctaattgttcatttctagtttacagaaaaatgaaaaactatgtttttatgtattctatatgcttttgaaaagtaagaggtgcaaagtgctctattcttacactatattgtgtgagaatataagtcgaaaccactctgcataagttcaggcttccattctcttcagtttgtaggttgagagaacccatccagaaacagtaaacattggtgtctgcccaagtctggtcctgggtggttcattcattcatttacataacaaatatttattaactgtctgctatatgcaaggcactgacctatggactaaggatgcagcaatgaacaaggcatatatgattcctgagttaatgggccctattctaatacatgatattttacaggtctgataaaagccaacaaggagaaatacaaaagcactaagagaaagcttatagtagggaagcttcgcctaatctgaaggtcaaggaaggctttctttttttcggaaagtgatatttagagagatgaatagattaataggatgagtagaagttatctaggtaacaaggaaagtaaaaaagaaattgtcaggcagaggaaatagcatgtgtaaagatctttttaaaaaataaaaggtgtgactcaagcaatttaaaagggctagggaggctagaaacagaaaataaatagatgaaactaataaggcagggagagccttgtaaatcacacttaaaattctggattttgttctaaatacccttgtacttaggagctattaaaatattttaaacaaggcagtgacaagatatttgaattattaagcttactctggctgctatatggagaattgatttatgagggttataaatagaaataggaagataagataggagactatggcaatattcctggtaagaaatggaagaagagctggcttggattaaaggggaggcagtggatgtagaaataaatggatgaattatagatatatttaggaaatgggttcaataagacttaataatggaataggtggaatataaatttcatgagggcagggggtgttttgtttattattatattcctaggtgtctgaaaatattgttgtgttgcctggcaagtggtagatcttcagtgaaatattattaactgaataaatacaatggataaatggggagcagggattaagagtgattcctgggtttccacattaaggaactggatggacaaagctaccatttgatgagaatggaagactaaagaatgatagatttaagagaaatcgagttgagttccagccatgttcatttgaaggatctgagaaacagtgcagatattcagtgtgtgattagacatatggtcatcattcttttttttttttgagatggagtctcgctctgtcacccaggctggagtgcagtggccctatctctgctcactgcaatctctgcctcccaggttcaagtgattcttctgcctcagcctcctgagtagctgggactacaggcgtgcaccaccacgcctggctaatttttgtatttttagtacaagacagcatttcaccatattggccaggctggtctcgaactctgatctgcccgcctcggcctcccaaagtgtggggattacaggcgtgagccaccgcgcccagccggttaccattcttttactctgagttcttccattgtgatcatctagtcagatgggtagatccttataaggctgagcataataagcttcctgatagctctacactggtatgttttggggttcatggctgagctacttttgtgttttatttatcttcctgatctctttttcactgtaagaaacatccagcacccagggaaatttgctgtctaattcatactccactcttcagactagtcctagtgttcagttttgttttgttttttttctgtgtctggaattctattaaaatgtgtcaggctgttttaatttttgttgtttaattttctttcacatgattatatgtgctccatggatttttttgtttgtttgttttttgtttttgtttttgtttaagcggggtcttgctcttgtcgcgcaggctggagtgcaatggcttgatctcggctcactgcaacctccgcctcccgggttcaagtgattcttctgtctcagcctcccaagtagctgggactacaggcacatgccaccacacccggctaatttttgtatttttagtagagacgggtttcatcatattggtcaggctggtctcaaactcctgaccctggtgatctgcccacctcggcctcccaaagtgctgggattacaggcgtgagccaccgcacccggaggaaatttttaacctcagtttttcttcaccatctgtaaaactgcatagaaggaatgtttaggataaaagatgcataacaatcataacaaaattgttgggttttaatgttatgagtacacttggaggattctatgtccacacataccttaaacatcctatagagtccttagcattttaaagttgaaaccaacagtatgaatgatggtagaattttcccccccaggaagttagaactgttccatatcttgatagagggatgggttataaggatgtacacattttccaaaactcattgaacttaagagtcttgcatgtgactgtatataaattatactttaattgaaaataaatttaagaaaataaaattggctgggcgtggtggctcacgcctgtaatcccagtgctttgggaggccgaggtgggtgaatcatctgaggtcaggagttcgagaccagcctggccaacatggtgaaactctgtctccactaaaaatacaaaaattagctgggcatggtggcggacacctataatcccagctactcgggaggctgaggcatgagaatcgcttgaacccaggaggtggaggttgcagtgagccaagatcatgccattgctctccagcctgggcaacatgaacgaaatgccatcttaaaaaaaaaaaattaaaagaaaagaaaattagcctcccccaccctcactatacctcagactcacccctgaaagatcactactattcatccctggttatgtacacttacaaacattttctgtgtgtatgcgaatgtatgtgtggggttttctttgcacaacaggatcattttacagtatatatactgttgtgcaacttgctctttccacttaatatctcaaggaatcttttctttgaatctttatagccatgtacctcaatcttagtagttttctttattttatttttgaataggaaatacatttacatggttttaaaaatcaaaacaatatactatgtatatattgagaagtctgacttccatccctatcctactcctattccacccttgcttcctcctgtcccctgtaggtaaacattttataactttattaagcatcctgtcagcatttcttatgcaaatatgtacatatatttttatttccccattttttttacaaaaagataaaatactatacaccactttatatcttcctttcttcacattatatcctttaaaaatatttccatattggccgggcgcggtggctcacgcctgtaatcgcagcactttgggaggccgaggcgggaggatcacgaggtcaggagatcgagaccatcctggctaacacggtgaaaccccgtctgtactaaaaatacaaaaaaaaaaattagccaggcgtgatggcgggcgcctgtagtcccagctactctggaggctgaggcaggagaatggcgtgaacctgggaggcggagcttgcagtgagccgagatcgtgccactgcactccagcctgggcgacagagcaagactgcaactcaaaaaaacaaacaaacaaacaaaaaagaacttccatattaatatatagaaagctgttttttttaacagttgcttagcattcctttggattattaaccagtctcataaatgagcgctattgaatagccctgtacctacatcagtttttacatatgcagtatatctttgggatgaattcccagaaatggaattgaaattgctgggtcaaagaggaaataggtgtaattttcttaggtattttcacaagaagtgttaattctaactttctgttttgaaatgatttcaaattttcaaaggagttgcaagaattgtacaaagaactgtatctccttcacccggatgcaccgggtgaattatatgtattatataattgtatctgtaggccaggtgcagtggctcactcctgtaatcccagcactttgggaggctgaggcaggtggattacttgaggccaggagttcaagaccagcctggccaacatgataaaactccatctctactaaaaatacaaaaattagccaggcctggtaccccatgcctaagggtgaggcatgagaaatgcttgaacctgggaggcggaggttgcagtgagccgagatcgcaccactgcactccagcctgggcgacagagcaagactctgtctcaaaaaaaaaaaaaaaaaaagtaaaaaagttttttaaaaagatgtatctatatatacatatttacatacacacccaagtgtgtatgtatatatgtttgtgtgtatgtacacaaacacattatttttatatgatatgatttttttatgacatgattatttttatgacatttgagagtaagttgtagaaattatgtttctttattcctaaatacctcattgtgtatttcctaacaaggacattcttttatataattaaattttaataataaaaatcagaaaatttaacatcaatgcaatataattatttagcctatagtccatatttaaattctaccataccttatagtatattttactatacctcatagtaattttttttagtccaaaatatcacacattgcatttagttgccatgtctcttttttttttttttttttgagacagggtctcactctttcgcccaggctggaatgcagtggtatgatcttggctcactgcaacctccgcctcccaggttcaaatgattctcctgccttagcctcctgagtagctgggactacaggcatgtgccaccacactcccaccacacccagctaatttttgtatttttagtagagacaaggtttcactatgttggccaggctagtcttgaactcctgacctcaagtgatctgcccacctcagctaagtgctgggattacaggcgtgagccaccatgtgtggcctagttgccatgtctctttaatctactttaatctgaaacagttcctcagccttgtttgtttatatgaaactgacatttgtaaagactagaagccatttgtcttgtataatgcctttaatttatatttgttttatgtttcctcgtgattttatatatagagtttgtttgtttgtttgtctgtttgtttgttttgagatggagtctcattcttgtcacccaggctggaatgcagtggcgcagtctcggctcactgcaacttctgcctcccaggttcaagcaattctcctgcctcagcctcctgagtagctgggattacagatgcctgccaccatgcctggctaatttttgtacttttagtagaaacggggttttgccatgttgcccaggatggtctccaactcctgacctcaggtgatccgcccgccttggcctcccaaagtgccgggattacaggcatgagccaccgtgcccggacctcatgattgtatttatttatttatttaatattattattattatttttttttttttgagatggggtcttgctctgtcacccaggctggtgtgcagtggtgcgatatcggctcactgcaaccgctgcctcccagattcaagcaattctcctacctcagcctcccaagtagctgggattacaggcatgtgccaccacacccggctaatttttttgtattttttttagtagagacgaggtttcaccatattggccaggctggtctcgaactcctgaccttgtgatccacccaccttgacctcccaaagtgttgggattacaggcgtgagccaccacacccagccttatgattgtatttagactagacatttttttggtagtatattatttagccattgctgtgtaacaaattatcccaaaacttagtggcttaaaagaagcatttattatctcataaattttgtggatcaggactgggtatagctttgctgagtgcctctgcctcaaagtcttacaaggcagcaattaaagtgtcacctaaggctattgtcttatctgaagggtcaacagaggatggatccgcttctaatctctctcacatagttaatggcaaaattaagttccttgtggattgttagactaagggttccagttccttgctggttgttagcttgaggtctacctcagttccttgccatgtggacctccatagggcaaccagcttctgttagagcaagtaaaggagagtgccagagagggcaaatgtgatgaaagccacaatctttttataaacctaattttgaaagtgacatacaaggctaggcatggtggctcaaacctgtaattccagcactctgagaggccaaggagggtggactgcttgagcccaggagttcaagaccagcctgggtaacatgacaaaaccctgcctctactaaaaatacaaaaattagctggtctggtggtgcatgcctatagtcccagctactcaggaggctgaggccagagaattgcttgaacccaggaggcggaggttacagtgagccgagatcacaccactccactccagcctaggccacagaatgaaaccctgtcaagaaagaaaggaaggaacaagggagggagggaggaaggaagggaggtagggaggcagggaaagaccgagaaagtgacataccatcatttttgctgtagtttgttcattagaagcaaaatcacttggtccagcccacactctggggagatgattttctaactccatttgtaataacttattctacttttattagttggcattatacagtaagaaagagctttcttttctcttcttatttattcatatatggctcatgtgttttttccaatgagttatattctattactaacattttttattttgacctcaaattgttttagatgttaccaataagaacctcttcaagctggttcttgtgtccttttgccataactctctcattttcttgaaccctttcttactttctgatataagaaaatattagagactcatactttccttgttccagttctgagatgaaccatttatccaaaagccttgcttcattttagtagggaatagtatttagaaactaagatctgggtgtgaggtatgctcactgctaatgggctgtcactgtttctaggccttgtcagcagacggagctaggaaaaacacacataaacacacccatatttatatttgtacacacactccctcaaaatcgtgagttcatattgatacctccagttctggttcttcctagccttccccctttccatctttgtatttttattttccaacagtaagaaccctggctcccagtgctatgaatatatttactcatttgctccatccactgcactccagcctaggccacagaatgaaaccctgtcaagaaagaaaggaaggaatgagggagggagggagagaggaagagagagaaggaagaaggaagggagggagggaaaactgagaaagtaacataccatcatttttgctgtagtttgttcataagaagcaaaatcacttggtccagcccacactctggggagatgattttctaactccatttgtaataatttattccacttttattagttggcattatacagtaagaaagagctgctgaagatttgcttgcaattggttgtctttaaactgagggtatattgtcaaagtactgtgctgaaaagttacctgtagtatagttatgtgattcattaaaataaagtttgtttctattatgtgcagttttagagttttgccacactctggttgattagtatattttctgttgcttttttgttttgttttgttttgttttgtttttgagatagggtctcgctatgtcacccaggctggagtccagtggtacaatcacagctcactgcagcctcaacctcgtgcacttaagcgatcctcccacctcagcctcccaaatagctggggctgcaagtgcacaccaccatgactggctaattttttaattatttatttatttatttatttattttagagatggggtctcactatgtttccccaggctgaccctgaactcctggggtcaagtgatcctcctgccttagcctccaagtgctggtattacaggcataagccaccacacctagcctagtattcttttttgaatatgtaaaacattaacataaagtcaaaactattaaaaaaaggtgtactcagaaaattgtcattcctcccctataccttctgcctcattcacaccacactctgtagataatcgatttcattagtttgtggtttatcctcactgtgtttctttttgcaaaacgcaaaaacaaaacctatacatatttatattttcttatgtcctcttctttcttacacaaaaggtaacacactatgtaggtagtcctggctttgaacagtttcactataaaaatatttgttactacagcttaaataacataagtctcctaaaaataattcaaattttagttaccatggtatattaactttgagtagttccataaaggacaaacttggctgctagcccttcagtccacagagcactttgaaaataacagatgagcaaaataatgtggccaatcacatgacttctttcaaagtatgtcagtgatcagtcactgtgtgcctataatttagttcatgcacagacagcaaagcatgtagttgtgttgccttccagtgataaacccacataacattttagaaaaatgtattaagaattggccagcaaagataaaagtgcagcaaagaaacaaaagtgataatgttttcagtgaaatttgaattgaacataaatggagttatagaagaaatagctgaccatgggaatgttcacactgctactttcaagaatctctagaagggcagctaaaggagcttagtgaaggtgaatttattgacatgaatgagaaaagtaattgtgatgaaaaggatgaagatgtcccagagaaagtaatgccagcaaaaacttcacattaaaggaactctcagatatttcaaagcattgaaacctccaagaataaataaaatgttggaagttgatccaaacttagaaaggagtatggcaacttgtcaagatgaagaaaaggtgcttattcctttttatttatttatttagagacagagtttcactcttgttgcccaggctggagtgcaatggcatgatctcagctcaccgcaacctccacctcctggattcaggcagttctcctgcctcagcctcccaagtagctgagattacaggcatgtgccaccacgcccggctaattttgtatttttagtagagacagggtttctccatgttggtcaggctggtctcgaacccccaacctcaggtgatctgcccacctcggcctcccaaaacactgggattacaggcatgagccaccatgctccacctgcttattccatattatatgttataggatgaaaagaggccaaactaatcttgacatgttttttacaaggaaataatcctccatggttctaatttttttttttttttttttttttttttttgagacagagtcgcgctctgtcacccaggctggagtgcagtggcacgatcttggctcactgctagcaccgcctcccgggttcacgccattctcctgcctcagcctcccgagtagctgggactacaggcgccggccaccacgcctggctaattttttaaaaaatatttttagtagagacggggtttcaccgtgttagccaggatggtctcgatctcctgacctcgtgatccgcccgcctcggcctcccaaagtgctgggattacaggcttgagccactgcgcccggtgggtctaatgttttaaattacactgtgttaaataaatattagtttgttggttttttttttagtttttttatttctctacaaatttacaaccaataagagtttttaatgctttgacaaaaaatgttaaaggtcatagtacaatcgcatttcttcccattgattattaacatcactttacatagtttcatcttgcattagcaattttgtgtgtgtgtttgtggttttaaggagcggagagtttaataggcaagaaggaagggagaagacagaaggaaggagctcccccttacagagacagagggagcggggctccaaaagaggaggtccccatctaccgcggataccagccaggtatatatgcagaggctggtggaggtgatgtctgatttgcatagggctcaggggattggtttgaccaggcatatcattcacgtagcccgagaaaaagctggccctcccaccccagccttttaatatgcaaacgtagggcgccatggatgttctaaacacgtggagatatgtggggggcagccatgtggccaggaacttgtggggcaagggcaagaaggctgtgggaatcgccaagttgaatggacctagtttctaatggcctgcatttgcatatcaaaggttgctggcctggctcctagagccggggctttaaaagaaacttttccggagatgctttaaaaaatgaaaacttcccaaggaccccttttcctgtctatctgcataaaataatttcttttattatttatttatttatttatttatttatttatttatttatttatttatttattttgagacggagtctcgctctgtcgcccaggctggagtgcagtggcgcgatctcagctcactgcaagctccgcctctcgggttcatgccattctcctgcctcagcctcccgagtagctgggactacaggcgcccaccaccacgtccggctaattttttgtattttcagtagagacgggatttcaccgtgttagccaggatggtctccatctcctgacctcctgatccgcccgcctcggcctcctaaagtgctgggattacagaataatttcttaataactcctaccacattcctccctgtggcgatatcaaactaactgctgttaggaggctttgggcgaccattgcttctggctacttcctgctgaaaaggggcgtctaatggagaacagcagctagggctcctcctggggttgatctaagggtcctcggaagaatggcgtccatgtgtggttcagtttacagcaccgtttggagtttgattgcttctaggcgagaagaaacaattcaagttatagtattgagtatacagagtccaaatatcaatacaagacatataagcaagagagtgcttaataaaggggttaaccaattccataaagaagactggaagtaattaaagagggattgtagccactcggggctgaagcccacattttccctgagcctgtcaataattttgatttgatttttaagtccctgtagatttgcctcttctttactacaggtgttaatcccaaagaagcatgtttcatttaaaaatgcattactggccaggcgtggtggctcgcgcctgtaatcccagcactttgggaggctgaggcgggagcatcatgaggtcaggagtttgagaccagcctggcctacatggcaaaaccccatctctactaaaaatacaaaaaattagccatcgtggtagtgggcgcctgtaatcccagctaattgggaggctgaggcaggagaatcgcttgaacccgggaggcagaggttgcagtgagccgagatcgcaccactgcactccagcctgggcaacagagcaaaactccatctcaaaacaaaacaaacaaacaaacaaacaaaaactgcattactaaatccaataaaaagtcctagtagactcagtgatagtaaaactttcatgcttcctttttgccagtaactattatccctgctataaggatactaattaagcaaaatacgacagcaatggaaactctgtccaatatttcagttagaaggtgctaccatggataaccctattgcaaatagtagagtgaggaaagcagttcccacaaatgtggtgtggtaggtaatttccatctaaaattttacttgccaacatatagaattcccctctgtgggcctacgaagttccttggttttattttcccaaacaaagaaacctccgggttacaggtaccttacttactttcattacctggcacaatttgcaaaataattgcccagaactagcatattgattcacattttcacattacccatccctttttcccccccaccaagctgcagaagatcaccacttgattcacaggaataagcagggccagggttagtctaaaatgtaggcaaaaagcttaaaaacaattaatgagactagggtttaatgacaaatgtatgataagctttggagcaaaatttttctctccagtcctcatttttggtaaaaactaattatgaatgaactttaatcttatacttggcctgattatttgcatgaagtgcagcaagaatggttatttctacataggacttttggattggctttgatgaaacactgttccacaaggaatttcagattagacttttaaagctgagcccagacatgggtttgtatcctctaatacctgtgagttgggttatcctctcctcttgaggtcccaagataaactcagagcttccagacctgttagaaagtgacattcttcactgaccacaggttaggaaccctgtgtggggactgtgtagacaaggtgtgaggccagttctccccaaggggcttttattggctctgcatgtcaagcttgattccttaaagggaaacacaccctttcagttaaagccttggcaaaataaccggtttttccaattgtgttctgttgacaaagaaaaatggattcttgctgcactgatgcgaacaactatattgccgtaagttaagagtacttacagatagtctccaaattttagaggaaccaggcagagaaaaatgaacatgctccaaattttgttcacagtagtataccttacttgattattaaaggccataaatagtttaaaataagtttcctttcccagtccatgcaccaaaatgatacggctctgatgagtggaggaacaacagggttcctggtcctcatgctggtttagataaaatgacacagacacatgtggagtggttttaaggagtggagagtttaataagcaagaaggaagggagaagagagaaggaagacgctcccccttgcagagacggagcgggggttccaaagctgaaagaggaggtcccccacattaacaatttttaaaataccgtacaactgcagaaaatgaggactgcctgtacatactgtttgacactttgtttttttttttaacttatcaactttattttgtttgtttgttttggttttgggtttttgtttgtttgtttgttttggagacgagtctcactctgtcagccaggctggagtgcagtggcacaatcccagctcactgcaacctccacctctcgggttcaagcaattctactgcctcagcctcccgagtagctgggattacaggtattcgccaccacatccagctattggttttggtttttgagacagggtcttgctgtgtcacacaggctggagtgcagtggtgtgatctcagctcactgcaacctctgcctcccaggctcaagtgatcctcccacctcagccttccaagtagctgggactacaggcatgcacaccatgcgcagctaattttttctattttttgtggagacggggtctcactatgttgcttaggttggtcacaaattcacagcctcaagcagtcctcctgcctcaccctcccaaagtgctgggattacaggcatgagccaccacatccagccttaccagctatattgaagtataatttatataacataaaatttgccttttaaaattatacagtgcaatgcattttgacaattgtttacatctgtgtaaccaccatgcaatcaaaatatagaacatttctataaccttcaaaagttccctcatgcccctttgcaatcaattcactacttctccagctccaggcaacaactggtctgcttcctgtcactataaattagtgttgcctctttcagaatttcatctaaatggaatcctataacatatactattttgtatccatcttcttttactccaaagttcttgaaattcattcatgttcctgtgtgtatcagcagcgtgttccatttgattgttgagcagtattgcattgtgtggatatatcacaatgtgttcattcattcaactgttggtggacatttgagttgtgtccagtttagtgctattctgaattaaagtgatgtgaacaatcatgtacaagtatttttgtaggcatattttttttatttctcttggataaataccccaaaacagaattgttttgggggtcatatgaaatgggaagtatatgcttaactttataagaagctgccaaactatttttcaaaatggtaatatcactttacattttcatgagcaatgcataaagcgttccgcttgctacattttctcaccaatgcttcctattgtcaattttttaaattttagcaattctagtgggtgtgtgatactatctcattgaagtttcaactgtttttccctgttgactagagacactgagcaacttttcatgtgttgtctatttgtatatcttcttgaagcattcgttcatctttaactgagctgaacgccttcttaaaattgagctatgggagttttaaaatatatccttgtagctgggcgtgatggcaggtgcctgtaatcccagctactcaggaggctgagacaggagaatcgcttgaacccaggaggcggaggttgcagtgagccgagactgcaccactgcactccagcctgggcaacagagtgagacttcatctaaaaaataataattatacatgtaattatatatgatttttatatatgtaatatatatattcttgatgtgagctctttgtcacatacatattttgtggatattttatcccagactatgacttgtcttttcattttcttagttgtgtcttttgaagagcagaagatgtaattttgataaagcccaatttattttttcttttatagtttgtatttcttatgtcctattcaaaaactccttgcctactgaaaacttatgatgattttctcctatattttcttttagaagttttatagttttaccatttataatttggtctatgaatccttttgagttgatgtttatgtatggtgtatggtgtgaggtaacaatgaagattcatatttttttccaaaggaatatccaattgtctctttggaaaaatatgctgagaaggctatcttttccccaccaaataatcttagcaccttaatcaaaaatcatttggccatggacatatgtaggtgtgggttttttctgggctctctgtgttagatggatagatagacagatacagatatataactgtgtttacacatatgtaactgtaaacacagttatatatctatatatccaccaacagttgaatgagaataaactattgttataagcatatatacacattgtatatatatgtgtacatatacatattgcatatgtatgtatacatatatacacacaaagtatatatatgtatgtatacatatatacacacttaaagtaatggcctccagttcgatccaagttgctgcaaaggacattatttcatgccttttcgtggctgagtaatattccatggtgtatatatatatatgtgtgtgtgtatatatatgtattatgtatatatatatgtgtgtgtgtgtgtgtgtgtgtatatatatatatgtgtatatatatataccacattttctttatccactcattagtcgatggggacttaggttggtttcacatttttgcaattgtgaattgtgctgctataaacatatgtgtccaagtgtctttttcatataattacttattttcctttgggtagatacccaatagtgggattgctggattgaatggtagatctgttttttgctctttagagaatctccatactgttttccatagaggttgtactaatttatattcccagcagcaatgtgtaagtgttctcttttccccacatccacaccaacatctattgttttttgactttttaataatggccattcttgcaggaccaaggtggtagctcgttgtggttttaatttgcattttcctgatgattagcgatgttgagcattttttcatatgtttgtgggccatttgtataccttcttttgagaaatggctatttgtgtcctttgcctactttttaatgggattgtgttttatttttcttggtgatttgttagttccttgtagattctggatactagtcctttgtcagatgtgtactttgcaaagataatattttggatgttatatttccattataatttagttcaaagtattttctaatacaccttgcaatttcttctttgacccatggattattttaaagtttgttattttgtttgtttattttgagacagagtttcactttttttgcccaggctggagtgcagtggcacaatcccggctcccagattcaagcgattctcctgcctcagcctcccaagtagctgggattacaggtgcccaccaccacacccagctaatttttttttcttttttttttgagacagagttttgctcttgttgcccaggctggagtgcaatggcacgatctcggctcactgcaacctctgcctcctgggttccagcaattctcctgcctcaacctcctgagtagctgggattccaggcatatgccaccacgccaggctaattttgtatttttaatagagacggggtttcttcatgttggtcaggcgggtcttgaactcccgacctcaggtgatctgcccgccttggcctcccaaaatgctgggattacaggcatgagccactgcacccagtccaattttttgtatttttagtagagatggggtttcatcatgttggccaggctggtcttgaactcctgacctcaggtgatccgcctgcctcggcctcccaaagtgcagggattacaggtatgagccaccatgaccagcctaaagtgtattgtttagtcaccaaatatgtaagtattacccaaatatatttgtcactgatttctaatttaattgtattgtgatccaaaaatatacattgtatagtttctattcttttaaattcgttaacatttcttttatggcacagaatatggtctatcttggtgagtgttgcttacacacaactgtgtaactgaaaactgtgtattctgcttctcgtggttgttgtatcctataattgtcaactagatcaagttagtaagagtgttgttcagtgatcttttcttcttcagtgtttactgtatttgctaatcccatccagtgaagtttccatttcatatattgtatttttcacttttagaagttccatttgactctttcatttccatcctcaattatcttcatatttttctttaaatttttgagcacatttataatggaggttttaaagtccttgtctgctaattttgtcacctctgtaattcctatgatgattttcttcctggcttggggtcataatttgttgcttatttgcatgtctaataatgtttttattggacagcagacattgtaaatgttatatttttgagtgtttggattttgtctttctttaagaactattgcagtttgttttggaaggctattatgttttttgcagatcaggttgatcttttcaaggcttgtttttaagctttgttaggacaggtctgtagtaacttttgccttgggctaatttagacctaccacttaattctgacttttttgattaatctgagtgttcagcagggtctctttattatggctaaatgaaattcaaacattttccagccctatgtgaccatcaagaattcagctaatagctccctggcagttcttcgcccagctgcagaaaagtgtcagtgcactctatgtatgctcagattattatttagccaaagacttggggatccatattaatattcctggagttctttgtgtagctccattctctttagtactctatcccataaattctggctgcctcaatctcctaatctccccaaactctaatatctattcctcaactcagcaaaaccatggtgttattcttggatttcccctttcctgccccacagtctgaaagttgtctccaggcaaaaaaaatggagatcctagtttgcggatcctcatttccttctccttttttttttttttttttttttttttttgagatggagtctcgctctgtcacccaggctggagtgacgtggcgtgatctcggcttactagaaactccggctcccgggttcatgccattctcctgcctcagcctcccgagtagctgggactacaggtgcctgccaccatgcccggctaattttttgtattttgtttagtagagacggggtttcaccgtgttagccaggatggtctggatgacctcgtgatctgctcacctcggcctccaaaagtgctgggattacaggcatgagccaccgcgcccggcctgcttctcttctcttatgggttagaatcctgcactgtcttttgaacaaatgtctaaaagcttttatcacacattttgatccacttcccagttgttatagtggtatatctggtttcacatgactgaaaggaaaagttttcaccttgctttttgtactaataatatatcctggaaatcattctatataaatttatagaaatcttcatttttaaaatagcttcataaaactccattgtaaaaaccaggtgcagtggctcatgcttgtaatcccacactttgggaggccaaggcgggtggatcacctgaggtcaggagttcaaggccagcctggccaacatggtgaaactccgtctctactaaaaatacaaaaattagctgggtgtggtggtgggcgcctgtagtcccagctacttggaaggctgaggcaggagaattgcttgatttcaggaggcggagattgcagtgagctgagattgcgccactgcactccagcctgggctacagagcgagactccgtctaaaaaaaaaaaaaagcaaaaaaaaaaactccattgtatgtgcacatatcattatctgttcaacccatctatgacttgtcatttaggtagtttccatccaatatttttgcaatataaaaaatgctaatgaagaacctgagatatatatatatctatatatatagatatatatgtttgttgttgttgttgttatttttgaagtatgtacgtataataaattcctaatagtgtgattgctgcatcataaggtaaaggcatatgtagttttgttaaatatagctattccccatcttgcattcctacaaatagatgagaatgtccattgtcccatagtctcctttgcagagtatattgtcaagctttttaattgttgccaacctgatgggtaaaaagatatctccaaataattttaattaaaatttctcttattatgaatgaggttaaatagtttttcatatgtttaaaagccagtttatatctttttgtttttttagagacaggaatcttgttctgttgcccaggccaaattgcagtgatgcagtcatagctcactgtagcctcgcactcctgggctcaagcaatcctcctaccttagcctcccaagtagctaggactacagatggatgccaccatgtccagctaatttttttatttttttgtagagatgtgaggtctcactatgttgcccaggcttgtcttgaactactggcttcaagtgatcctcccacctcagcctcccaaagtgctaagattacagccatgaaccaccacaaatgaccctatatatttttttgaattgtctgttcatgtcttattttcatttttctagtagttttttttttaagtgttttagcctaaatttgtaaaaagtttaggggatatatgaagggactctaaatgtttatgaagaaatttaattaaaagataaaaataaaaatataagctttatttttcaacatgagctccatcaagttcaaggcacttttgtaagcaatgatactagccatttagttcacccctaaagaactgagagtcctgggaatttagccatgtcaatgcagtattttttatattggttactgaagaaaaaatgggtgccctttaaagttgtaagattaggaacaaaaacaagtcagaagaagccaaatcagcactgaaaggtgggcacttaatgattacccaagaaaactctcaccaaattgcccttgcttcatgagaggaatgagcgggagcattgtcgtggtcaggaaggattctggggaagttttcccaggcattttttctgctgaagctttggtaactttctcaaaacactctcataataatcagatcttatcactctttggccctccaggaagtcaaccagcaaaatgctttgaacatcccaaaaaagcgcttgccatgacatttgctcttgaccagtctgcttttgcattggtcaaatgccaccacttccacctcttgtgctttgttttcaggatcagactggtaaagtcatgtttcatctcttgttacagtttttttttttttaagaaacccttcaggatcttgatcacatttgtttaaaatttcaactgaggctgggcccagtggctcatgcctgtaatcccagcactttgggaggccgaggcgggcaaatcacgaggtcaggatttcgagtccatcctggctaacatggtgaaaccccatctctactaaaaatacaaaaaattagccgggcatggtggcaggcacctgtagtcccagctactcgggagggtgaggcaggagaacggcatgaacccaggagacggagcttgcagtgagctgatatcatgccactgcactccagcctgggcaacagagtgagactccagctcaaaaaaaaaatcaagtgaaaactctggtcttaaactgcagctgatctattttatttttattttttttcagacacagccttgctctgttacccaggctggagtgcagtggcaccatcatggctcaatgcagccttggcctcgtgagctcaagcaatcttcccacctcaggctcccaagtagctgggactacaggcacatgctaccatgcctggataatttttttgcagctaatctagatgtaatggttttggcacccatctaatggaaagtttgctcaactttaatttttcagtcagaattgtgtaagctgaaccgagatgtctatggtgttggctattgtttctgctgttaattgtaggtcttctttaattagagcacagacaagatcattttttttcctcccaaattgatgtagatggtcttttgctgtgggcttcatcttcaacattgtctcatcccttcttaaaacaagctagctacttgtaaactgccgttttctttggagcattgtctccataaacttttcacaaaacatcagtgatttcaccgttcttccactcaagcttcatcataaatttgatgtctgttcttgtttccattttagcagaattcatgttactctgataggggctcttttcaaactgttatcttattcttcttagtgcctcaaactagatcctattcagacatggtataacaagttagtatgggtttattttggtgcaagaaatattttgaaatccacacatttttttcataatatgcattttccatgaagtttttgaaaactccttgtattaggaatattagtcctttgtccagtaaacagactgcaaatattttctcacagctcatcatttaccttttggcatttttttgcaatgcaatttttttccctttgtttttgttttttgtgtaatgaatcaatgttttcttttttttttttttttagaccaagtctcactctgtcacacaggctggagtacaatggtgcaatctcagctcactgcaacctctgcctcccaggttcaagtgattctcatctctcagcctcccaagtagctgggattacaggcacatgccaccatgcctggctaatttttgtatttttagtagagatggggtttcaccatgttggccaggctggtctcgaactcttgacctcaagtgatccactcacctcggcctcccacagtgctgggattagagacgtaagccactgcccccggccaaatcaacgttttcttatattgcatttaggttttaagtcatagttagaaagcctttccccacacctaggttatagaaacattcattacttttttcttccagtgctagtacttgcatggtttttggtttccacatttagatccctgatctaattggagtttattcttttgtgtgctgagatatggatctgattatatcttttttcccaaatggctatccagttgtcccaatgccatttattaagcacttcatctttgtcccagtgatttgagatagcatctttatcatgtaccaaacttctatagtgccagaagatttttattttttttagacagggtctggctctgttgcccaggctggagtgtagtggcacaatcccagctcgctgcaacctccgcctcacatgctcaagtgcccgcacctcagcctctcaagtagctgggactacaggcacatgccaccacaccaggctgatttttatatttttttgtagaatgagatttcaccatgttgcccaggctggtctcaaactcctgagctcaagaaatccgcccacctcagcctcccaaaatgctaggattacaagcatgagccaccacacccggctgccagaaaattttaatgatcagaaaaccacaattctttcttcctctgttatatgttgaagtaaaatacttcatttagaaaactaagccgggcacagtggctcacacctgtaatcccagcactttgggaggttgaggcaggcagatcacctgaggttaggagtttgagaccagcctggccaacatggtgaaaccctgtctctgctaaaaatagaaaaatttgctgggcatggtggcgggtgcctgtaattccagctacttgggaggatgaggtaggagaattgcctgaacctgggaggcagaggttgtggtgagccgagaccacgccattgcaccccagcctgggcaacaagagcaacggtaaactccatctcaaaaaaaaaaaaaaaaaaagaaagaaaaaagaaataactcagccatacaaggctacccatttggtgagaactaataataagttagatagcaaggtaatagcaaaatgtgggtgcaaaattaaagcaagttatttctgaggagaatgtaggtctcatggaagattttcatgtggacaaatttagtaaattttttgcaggtagtttcctgacatatttaacatttgtgatatagtaaacaataagaaggtactaaaggctgggcgcggtggctcacgcctgtaatcccagcactttgggaggccgaggtgggcggatcacaaggtcaggagatcaagaccatcctggctaacacggtgaaaccccgtctctactaaaaatataaaaagttagctgggcgtggtggcgggtgcctgtagtcccagctactcgggaggctgaggcaggagaatggcgtgaacccgggaggcggaacttgcagtgagccaagatcaagccactgcactccagcctgggcaacagagcgagactccatctcaaaaataataataataataataaggtactaatatgatccagactagaagagaatagcactaaaatgggagatggggtaaacctgtggttttttttaccttaggcttttgacttccaaaattattgtttttgctgggtgcggtgggtcactcctgtaatcccagcactttgggaggccaaggtgggaggattgcttgagcctaggagtttgagaccattctaggcaacaaagcaagaacctgtctctaaaaaaatttaaaaattagccagaaatggtggcacatgtctgtagtcccagctacttgggaggctgaggcaagaggattgcttgagccttttgaagttgaggcttcagtgagccatgatcaccccactgcactccagcttgggcaacagagcaagaccccatctcaaaaaataaaacaaaatagactgggcacgatggctcacgcctgtaatcccaccactttgggaggctgaggtggatggatcatgaggtaaagagatcgagaccatcctggccaacatggtgaaaccccgtttctactaaaaatataaaacttagctgggcgtggtggtgcacacctgtagtctcagctactcgggaggctgaggcaggagaatcgcttgaacccgggaggtggaggttgcagtgagccaagattgtgccactgcactccagcctggcgacagagtgagactctgtctctaaataaataaataaataaaacaaaataagtaaaataaaataaatgtttgtagttccaaaatattttgatgacataatttcttcttgttctaataaaactacatatgcattggtcctatgacctagtaatcacactattaggaatttatcataaatacacacctcaaaaattacaaaaatacatatataccagcttatttattacagcgttatttgtaattgcaaaaacattgtagatagaatggaggtcacataaaacttattcttaagattcagaccgggtgcaatggctcacgcctgtaatctcggcactttgggaagccgaggcaggcagaccacccgaggtcaggagtttgagaccagcctggccagcatggtgaaaccccatctgtaccaaaaatacaaaaattagctggtcgtcgtggcacgcctgtaatcccagctactcgggatgctgaggcgcgagaactgtttgaaccccggaggcagagactgtagtgatctgagatcatgccactacattccagtctgagcaacagagcaagacttcgtctcaaaaaaaaagatcatagatcatcttatcaaatcaaagtatgcaaaatattcaagtaaacttcagataaatatgaaggctaaaccattcagcttcttcaccaaacccttgaatgtcccacctgtctaaatggagatacatgtttgtttgatttattggttaactgtttttattccatttttcctcaaatgatcccataatttgaccttaggaagctgttcaaatagacacattaggttgaatggaaagactactcgatgatatttaggattttaagaggattttatgtattttttccttgtgtgcaataatttaatagcatcttgaataggattttctgatattactaaccctctgggaataatattaggtaattagacagttagctaatattaaaatatgtatcaggtaatatttattgagagtttcctctgtgccaagcaggatcaacttcataggcaggcgacctgtgcggggacacagggcttcatgcttagataggcccccttgctttgaaggcccctaccctttggttagggctctgctgttaccatcttgaaattcttaataatttttattttatttttttgagtcagggtcttgctctgtcgccctggctggagtgcagtggactcactacagtcttgaattcctgggctcaagcaatcctcccacttcagccttctgagtagttaggacgacaaacacacgccaccatgctcagataagttttttgtttgtttgtttttttgtttttgtttttgttttttgtagagatgggactgtccctatgttgctcaggctggtctcaaattcctggcctcaagtgatcctcccacctcagcctcccaaagtgctgggactacaggcatgagccactgtgcctggtcaatcatttttattaacaagcccaagccctcttttttttttttttttttttgagacagggtctccctctgttgtccaggctagagtgcagtggtgcgatcttaccttcactgcaacctctgcctcctgggttcaagtgattctcctggctcagcctccctagtagctggaattacaggcacccacccccatgcctggcaatttttttgtatttttagtagagatggggtttcaccatgttggcaaggctggtctcaaactcctgacctcaagtgatccacccaactcggcctcccaaagtgctgggattacaggtatgatccactgcgcccggcctccaagccccctatttttattttgcactgaccctacaagttacgtagctaggcttagttatgtttttagcaaggaaagtgtataatctcatgtaccttttgaaagattactcaggtctctgcatgtgaaatggaatttagggaatgcaagagagggagtaaaaataacagcgaggaagctatgatagcatttaaggttgctttgactcaggggtagcagtagatagggtaagtaattgatagtttcaaaatatattttgggagtagtaagcattggtatggattagtaatatactggatgtggggatgcagaaaaaaatattaaaaattacttctgaaattctggctggaatagaagtgccacttaccaggtaaggaaggttggagacataacatatttgagggtgtggtcaaaagatgagtttgacattatgctatgtcatataaaagacatataaaagactacctattttataattcctttttaataaaatattcagaaaaagcaaaactgtggttgcctgaggctgaagctaggaagattgactacagacaagcatgagggaaattttgggggtgatgagagttttctaaaactggattgtggggttggttgcattactgtataaatttattaaaaatccctgcatcgtataggggcactatattgtatgtagaaagctgtgaaaagattttaaaaatgattgacatgtctgtggttatatcaatgagtactattattattcccattttatacataaagaaaataaaagagaagttaaaaataaaagtttcatggttacatagctactaggtgtaatatccagtattggaatttgaatctttttgacactaagaccttactctcgatcatataatacattcactttctattttaaagttatattatagccgggcacagtggctcacacctgtaatcccagcactttgggaagccgaggcaggcagatcacgaggttgggagatcgagaccatcctggctaacacggtgaaaccccgtctccactaaaaatagaaaaaattagccaggcgtggtggcacgcacctgtatcccagctactagggaggctgaggcaggagaatcgcttgaacccagaaggcagagcttgcagtgagacgagatcgtgccactgcactccagcctgggtgacagagtgagacaccatctcaagaaaaaaaaaattatattataaatgctgcatctcattggtcagaagctctcttgaaattataaaacaaagaagaaaaaagataaagactgggaaattgtgttgaatcagtatataaatcctgtatactggtccttccatttcccctagaaataagtgatacaggccaggcgctgtggctcacacctgtaatcccagcactttgggaggcggaggctggcagatcacctgaggttgggagttcaagatcagcctgaccaacatggagaaacccccgtctctactaaaaatagaaaattagctgggcatggtggcacatgcctgtattcccagctactcgggaggctgaggcaggagaattgcttgaacccaagaggaggaggttgtggtgagccaagattatgccattgcactccagcctggggaacaagagtgaaactcaaaaaaaaaaaaaaaaagaaagaaaaagaaaaagaaagaaggaaggaaggaaggaaagaaagaaagaagtgatacaacaagttacagcatctttgtttattatccactgtgagttgtattaccacactttacttggctctttggcaaactatattatctcttcagatcactagggctaggaaggcccactggtaacttgaaggagtaaatgtatcttctaaaaaatgcttacttccagggagattggatccacacaagtgaatacatatatagtccttagtgtatgctatgattattttactatgtcagtagcataaagattgctatattaataagcattaagtgcctgctgtgctagacagtgaggatgcaagtggccaccaaaatagcatggtccctgccctcctggagcttctttttttcttcttcagtgggggaagcagatactttgcttatgcaaaaataattataaaatttaaagttgtgccaagttcaatggaaaaaatataaggtgttctgagagagcataacaaaggatcctggttttaactggggcctaatggaagacctctattaggaaataacatttaaactaagaccagacagacctgtagaaattagcaaagcaaagggagggaggaaaaagcagctttcctggcaaaggaacaatttgtgtgaaggccctgagacagggaagggctggggttctgaccaccctccaagtggtgcaatggaatatagtgagagagggagaagacatgagaacttggatactatgcaaaggatttggtattttaattcaagagcagtatgatgctactgaggagcagctggacaattgtgtgatccaattaaaattttaggaagatgaacctcgctattgtggagaatgcatacacaagggttctgttggttcatgaagaggtcttaagaaaactatgagctgggtgcagtagctcaggcctgtagtcccatctacttagaagtctgaggcgggaggatcccttgagcccaaggagctggaagttacagtgagctatgattattccactgtactccagcctggatgacagagcgagatcctgcctcagaaacaaaaaccaaaaaacaaacaacaacaaaaacaacaacaacgaaaatctcagaaaactacaggccttattatcaagaaaatgacaggccttattattgagaaaactacttacatttttaaaagctgattttcaaaaaccagattgtgaattaagtgatgctgaataggggaaaaaaagactgataaaccagtgtatctctgaataacccactagatcagtgcttgtcaaactttaatgtgttttcaaatcaccctgatgttttgttaaaatgtaagtcatgtctcagtaggtctagaggagggcatttctgcatttctaacaagctccccggtgatgcctagaccattggtcctcacactttgagtagcaagtgattgggctatactctttattctaaattctaaatgtattctatcttctaatgcctatcagccctcttgctggtctggctaattatcaaacttgagcatttaaaactgggggttttcagagattaattgaagtgttaaagacatggaaatataggtcacatatggcttttcatctcttccggaaatatcctatatatccttacttcttttctacctacctaacctatgtgcctaccccttcacttatgttcaaggttctattatacttcaaaaggactctatgcaatcaaagtgatgtccaagacaaatatacagaaatagtatgaggctctaacactttacatctaatggagtggtttgcatcattaattgaggcttactctgtgccaggcactttacctgccttcttcatttaataggataggagcaggaactcttagaggttcatttcttgttcaaggatatacatctcatctctggcttatatcacagtggactcttttattcactatcctaatcattataattttgtttggtgacaacaattctaaatgcagaaaagttaaggctctttattctgtgactaaaggctttgtattttctaaagatttgtggagctttgctgccattatttcaataattttataaagatcctaggtggtaaataggcctggctttttttctttttgaaatcttctccgtcttcttcttcattagcagtgcaacttcttgtggcatatggtacccaagatcttgggaaaaggattgatcaagtaaagggaaacgatagagagagtgtgctctacaactgagatcatgctccttgtgaaagacagggtagggaaatttcttattgctccctggttcttaagaaatgagagctaacaatgacatccagttttaaaagaaataaaatctgaattgtacttttaaattttataagccagagttaaaccaatagattgtaactcctgctaatttgatagtagctccagataatgaggaagtgacagggaatgctaatttcatttggtaagagataaaactgaaattattaatgtctccacggaaatgctaaatgcctccttacaagtagggtccggctaattgtctgtcttccaacaagccagatttgttggtgtttttccagacaatgttgtgtagttttcggtttggttcgatcccctttcttgtgatcaaagaaagtgattcaaatgtttaatgagtcttgatttggattggagacttgcagaacggctagcctcacagccccaaggctggctttccctaaggtaggtttcctatgcaccgatactggcaaggcgctttggctggaaactctggaaggaagccaaaggaaagtgaagttcctggcgctagcgcgtgtcctgctcagagagcccggcgctagctcattcttcgtgcagttattggctgggactctgtgtgccgctgtcggccaatgaagacgctggagatcgggcccctgcccgtcccctttctgcgccccgggatgaggcagagactgaacagccggcgagcaaatcaacggcatccagaaagccatgtcggactcggcgcccagcgcccaagcgctaacccgctgaaagtttctcagcgaaatctcagggacgatctggaccccgctgagaggaactgcttttgagtgagatggtcccagaggcctggaggagcggactggtaagcaccgggagggtagtgggagttttgcttctgcttggtgccttgaacaaggcttccacggtcattcactatgagatcccggaggaaagagagaagggtttcgctgtgggcaacgtggtcgcgaaccttggtttggatctcggtagcctctcagcccgcaggttccgggtggtgtctggagctagccgaagattctttgaggtgaaccgggagaccggagagatgtttgtgaacgaccgtctggatcgagaggagctgtgtgggacactgccctcttgcactgtaactctggagttggtagtggagaacccgctggagctgttcagcgtggaagtggtgatccaggacatcaacgacaacaatcctgctttccctacccaggaaatgaaattggagattagcgaggccgtggctccggggacgcgctttccgctcgagagcgcgcacgatcccgatgtgggaagcaactctttacaaacctatgagctgagccgaaatgaatactttgcgcttcgcgtgcagacgcgggaggacagcaccaagtacgcggagctggtgttggagcgcgccctggaccgagaacgggagcctagtctccagttagtgctgacggcgttggacggagggaccccagctctctccgccagcctgcctattcacatcaaggtgctggacgcgaatgacaatgcgcctgtcttcaaccagtccttgtaccgggcgcgcgtcctggaggatgcaccctccggcacgcgcgtggtacaagtccttgcaacggatctggatgaaggccccaacggtgaaattatttactccttcggcagccacaaccgcgccggcgtgcggcaactattcgccttagaccttgtaaccgggatgctgacaatcaagggtcggctggacttcgaggacaccaaactccatgagatttacatccaggccaaagacaagggcgccaatcccgaaggagcacattgcaaagtgttggtggaggttgtggatgtgaatgacaacgccccggagatcacagtcacctccgtgtacagcccagtacccgaggatgcccctctggggactgtcatcgctttgctcagtgtgactgacctggatgctggcgagaacgggctggtgacctgcgaagttccaccgggtctccctttcagccttacttcttccctcaagaattacttcactttgaaaaccagtgcagacctggatcgggagactgtgccagaatacaacctcagcatcaccgcccgagacgccggaaccccttccctctcagcccttacaatagtgcgtgttcaagtgtccgacatcaatgacaaccctccacaatcttctcaatcttcctacgacgtttacattgaagaaaacaacctccccggggctccaatactaaacctaagtgtctgggaccccgacgccccgcagaatgctcggctttctttctttctcttggagcaaggagctgaaaccgggctagtgggtcgctatttcacaataaatcgtgacaatggcatagtgtcatccttagtgcccctagactatgaggatcggcgggaatttgaattaacagctcatatcagcgatgggggcaccccggtcctagccaccaacatcagcgtgaacatatttgtcactgatcgcaatgacaatgccccccaggtcctatatcctcggccaggtgggagctcggtggagatgctgcctcgaggtacctcagctggccacctagtgtcacgggtggtaggctgggacgcggatgcagggcacaatgcctggctctcctacagtctcttgggatcccctaaccagagcctttttgccatagggctgcacactggtcaaatcagtactgcccgtccagtccaagacacagattcacccaggcagactctcacggtcttgatcaaagacaatggggagccttcgctctccaccactgctaccctcactgtgtcagtaaccgaggactctcctgaagcccgagccgagttcccctctggctctgccccccgggagcagaaaaaaaatctcaccttttatctacttctttctctaatcctggtttctgtggggtttgtggtcacagtgttcggagtaatcatattcaaagtttacaagtggaagcagtctagagacctataccgagccccggtgagctcactgtaccgaacaccagggccctccttgcacgcggacgccgtgcggggaggcctgatgtcgccgcacctttaccatcaggtgtatctcaccacggactcccgccgcagcgacccgctgctgaagaaacctggtgcagccagtccactggccagccgccagaacacgctgcggagctgtgatccggtgttctataggcaggtgttgggtgcagagagcgcccctcccggacaggtaaggtttagcaagtcatgcttgaccctgttagtgcttttttattcctacatcatattgaggaaggaatggagctgtttttttagtgatgaagatgttttcctggtgatgcattcacactttcaactggcccttcctagatcaaagttagtgcctttgtgagatggtggcctgccagagtgtggtttgtggtcccatttcagggggaagatacttgactcatctgtggacctaattcacatcctcagcactcttttgctatcacaactaaccaatcttgctaagggatggttaagctaaaacacaagatctcagcgatcagagtttagcttggtatcatttacattaggaataagctgctggatacctctaaccagtggcagcttctaggaatacaaaaactacctcattcctccacctttcaagtgattgtgacatttgtattaaaactaatagctttttgataattttcctttgtttatacagatcgtgtacctcattctcagataattttttatgaatgaaatgaaattccaggcatcctttaaattttatttcaagcattctactggaaatgatgtgcaccctgcttacaaaatatttttaccttataacagtaatgcatgtttgctagaaaattcagaaaatacagaaaagtatttaaaaaattaaaactataatctccaaacccaaagataaccatttttaattataaaagtaataatttatttcaaaaataaatctaggcaacccaagaaaacataaagtagccagactcagtggtgtgcacctgtagttcttgctgctcagtgcctgaggtgggaggattgcttgagcccaggagttctgggctgtggtgcactatgctgatcaattgatcaatccactgtctgcactaagttcagcatgaatacagtgacctcttgggagggcaggaccatcaggttgcctaaagaggggtgaactggcccaggttggaagtggagaaggtcaaaactgctgtgctatccagtagtgggatgacatctgtgaatagccactgcactccagcctaggcaatatagggaaaccatgtctctttaacaataacaacaacaacaacaacaatcccagaaactacaaaaggagagtctttttggtgcctccagtgttagtccctgtccttccagccttatttttcttaagtatatgcacaatgtgaaaggtagataaattcatatccttagacaggtaaagcattcattaattcagggtggtatgcaaggatactatccaaggcatggtatccatgcaaggtgactgcaaggcctttgccctggagagaaccctatacatactctcaactgtaggagaaacactgttattttgttactcagtgcatcattgctatcaactcttggatttggcagttagtcaaatgaggttctaccatttaccaactaggagtctgtggccaagttactcaatctcctttctaagcctcttcctcatatgcaaaaagggaataataagtgttttataagattcatgcatgatataatgtatgcaaagtgtttagcatggtgcctggcatatcataactgttaaacaattattagccagctcctagcattttgggaggctgaggcaggcggattgcttgaggccagcagttcaagaccagcctgagcgacatagtgagatcctgtctctacaaaaaaaaaaaaaaatgtgttttcattagctgggtgtgttggcatgcacctgtggtaccagctacttgggaggctgaagtgggagaattgcttgagcctgggaggttgaagctacagtcagctgtgattgcaccactacacttcaaccatggcaatagagtgagaccctgtctcaaaaaaaaaaattatcagctattactataattatttttattagttcctcactcacctaaaatctcaaacacaccttagaaatacacatatgagaacaaccaaaaatgacaaagtagaagcacatatgaaaaggctaagaaagcatgaaagccagcaagaaataactgccgctcttctggtcagcctggaaagcaactggcattttccctagaacaatgttttcaaacttggttgcacattaaaatcacctagagaccttttaaaaattctgaaacccaggccacaccccgacaaatgaaagcacagtctctgggggtgggacataggcatcattttttgaaggtccccacttgatcctaatgtgcagacaaatttgaaaaccacagctttgggaggctgaggtgggtggatcataagatcaggagtttgagaccagcctggccaatatggtgaaaccccgtctctactaaaaatgcaaacattagctgggcatggtggcgcatacctgtagtcccagctactctagaggctgaggcggaagcatcagtgagggagaatcagtgaacccaggatgtggaagtttcagtgagcccagatcacaccactgcactccagcctgggcgacagagcgagactccacctcaaaaacaaaaagaaagaaagaaaaaagaaaagcagtactctggaacctaccaatccatcatttagcatatttgtgaagtaaagtgttattctggtatttgcagaaccagaatccagctttattgggccaggcccaatttttttaaaaaacatggtaaggtctcccagccttaaagtattacatagcatagctctaaaagatcactgtaggaagacataaaatggtatttcagtcatctaagggaaaaaccttcctaaagcactagcccctggacaactattatttaaacatctacagctgttcaatagatattgggttctttttggagggatgtgacaaaattcttgtataattagattgtgatgatgattgtatcagtttagtacatgtaaatacactgaaaaccattggattatacactttaaatatgtgatttgcatggtatgtgaattatgtctcagtaaaaatctagagatggggctgggctcagtggctcacgcctgtaatcccagtacttagggaggctgaggccagcggatcacctgaggccaggagttcaagaccggcctggccaacatggtgaaacttcatctctactaataatacaaaaatcaggccgggcctggtggctcacgcctgtaatcccagcactttgggaggcggaggcgggcggatcacgaggtcaggagtccaagaccagcctggccaacatggtgaaaccccgtctctactaaaaatacaaaaattcaccaggcgtggtggctgaggcaggagaatcgcttgatggtggaggttgcagtgagccgagatcgcgccactgcactccagcctgggtgaaagagcgaaactccatctcaaaaaaaaaaaaaaaaaaaaaatcagccagatgtggtggcaggtgcctgtagtcacagctacttgggaggttgaagcaggagaatcgctttatctcaggaagcagaggttgcagtgagccaagatcatgctgttgcattccagcctgggcaacaagaacaaaactcactccatctcaaaaaaaaaaaaaaaatatctagagatgggagaatcatatggctggcataaaaaggtcaagtcaaagatatgtaagattaaggctttacgatgctccagttctagtaaaacagaccaggtacttgttttggtgtgaaattgccaatataagtatagtactgtacatattagttgtttagcttaggtaagtcttttaatctctttaaactccagtttcctcatctataaaataaagagaatatctactttgcaaacttgttgtgagagtgaaaagtaatgcatataaagtccctgtatggagcaagtactcaataactatttgttgaactaaaaatgataatactgatattcaccatttattagcatccctatgtgccagacactgtaaacaattaaaagttatcattctggtacccagagtacagtatgagacagacatgcaaaaaaaaaaaaaaaaaaagataatggagatctgcatagcataagatgcagtgggaccaaacgggaaaaaacacctaaatgagcctggagaaaggaagaaatgatagaggtggtgatgcttgagctatgatctaaaggttgagtagtagcttgtcagacagtaaaggggaaaggacagggcagggaggggccattgcaagaaattccatgcagagggattatggtatttcattatcactgaaccttaaactgtgtgtgtggccgggtacggtggctcatgcctgtaatcctagcactttgggaggccaaggtgggcagatcacttgaggtcaggagtttgaaaccagcctggccaacatggtgaaacctcatctctattaaaaatacaaaaaattagccaggtgtggttgtgggtgcctgtaattccagctacttgagcagctacttgagaggtcgaggcaggagaattgcttgaacccgggaggcagaggttgcaatgagctggtgtcaggccactgcactccagcatgggcaacagagagagactccatctcaaaaaaaaagtgtgcgtgtaaaacagacagtctttgtaggagatgaggtgaagcaagtaggcaggagttagatcctgagttacctttgggccaagccaaggagtttttattttattccatatagatgacagtcactgcagaaatttgaactgatatgcatatatcatgaggtttttttgttttagaaatattattctgtcagtcataagtgaagggactggggacattgggactggaggcaaagagatcttatctctttgcaatagtttgaaagctattgcaatatttgaagagaagattgataaatgcttgaaccagcacagtggcagtacagatggagggagctgactacaataaaatcatcaggacttgttgattgacatgatataggaagtgagggacagggatgagtcaaggctgatccccctagatcctgactaaggaagctgggtggttgacagtgccattcacagagacagtgaattctggcataaacacctaataggtcaggctggtttacacctccatcattcccatgggagaaggtatagaggggtgtgtgtttgtgtgtgtgtgtgtgtgtgtaaaagaacacagaaagccagattcctctttttgacaccagaatattggttcccaccatagtcaaaaggatattcctgaggatcgaggcttggaaaaatattggggaaggataagaactccagttgttgctgctttttttggcagccagtgtaacctaggtaaggacttggttgaattaagaaatttcatgtccagatcaggatggatttttctatttctctgagctctggtgtgtttcccactcagattgcaggtcgtaggtacctacggtgtgaattgtgttgtgtttctgtgcttgtgcaagggagtagctaggttgctgggaggtctggatgagggtgggggtggggtgagatcaagtctccagctccaagaggtcccctggggctaagtgaaaagcttgctcttttgaaatggtcttcgttggtaattaacaaaagatcaagaataccttggtgtcagataaagggaatttgtaggcacaatgctgttggtagctgatctcaatcattcaaggaagctattaaatctatgaacattagcattctgccaggtaaagagatctggtccttagcacctcccagacacactgattctttactgttttgaaacatctccctctcctggcttcctccaccccgcttccatactgtccttgaaatcaatgaatggtaatttagtgtatctagtgtatcactagcaaatgtctgaataagaaaggtttggtttccgctgtgtctcctgttacaatgagaacatgtactgcataaatttaattggctacgttaatgtgtaagccttttctgcaaagagatggatccgtttctgaatattctgcagaagggcagagttttgagtatatggcagtggttctaattagcagttgctccaatacaatcagactgagacggaagctactcatttagaatactggttgatgacaacactggcttgaacaaagtgaccactctccaatggctactctccctctcagtgggccgcaggttgctagggctcaggctgtggctgttttccccgccgaaaaggggcggggtcagtcggtgtgttaggaaaaaaaatgtatatatatatatatgttgtctgcctccccacagagataacaacccgtggaaaaacatgccgttgagcgggaggaaggcgaaaagataggctgggttttttggggggtgggggagcgtggaggatagggtgggctttttcccctccaatgctgcgacgcattaaccctgctgctgttgggacgttctctgctcagcctattggctgagcccgggagccgctgtctgccaatcgggtggtgaaaggcagacaaatctaccccgccaccagcaaaaacggcgcgtaacccttgcggcgccggccgaaccgcgccagagctggcgcggggaaagggagataggtgtctccagctgctgtggctgtttggggcgggtcggcttcatccgcgtctcaggagcaagtagagaattagcgggcggcagcaatgctccgcaaggtgagaagctggacagaaatctggcggtgggctacccttttgttcctcttttaccacctgggttacgtttgtgggcagatccgctacccggtcccagaggagtcacaggaagggacttttgtagggaatgtcgctcaagatttcctgctggatacggacagtctgtcagctcgcaggctgcaggtcgctggagaggtgaaccaaagacacttccgtgtggatttggacagcggagccctgctcatcaagaacccaatcgaccgagaggcactgtgtgggctcagtgccagctgcatcgtgcccctggagtttgtcaccgaaggtcctttggaaatgtaccgagcagaggtagagatcgtagatgtgaatgatcacgccccccgttttccgcggcagcagctggacttggaaattggggaggcagctcctccaggacagcgtttcccgttggaaaaggctcaggatgcagatgtggggagcaattcgattagcagctataggctgagctccaatgaacactttgcactggatgtgaagaagcgcagcgacggcagcctggtcccagagctgctcctggagaagcctttggatcgagagaagcaatcggactaccgcctggtgctgactgctgtcgatggagggaacccgccgagatctggcaccgcagagctccgggtatccgtgctggacgtaaacgacaacgccccagccttccagcaatccagctacaggattagtgtgttggagagcgcaccagcgggcatggtgctcatccagctcaatgcctcagacccggacctgggtcccagtggtaacgtcaccttttatttcagtggtcatacccctgatcgtgtaagaaacctctttagcctgcaccccactactggaaagcttactcttttggggcccctagactttgagagtgagaattactatgaatttgatgtgcgggctcgcgatgggggttctccagccatggagcaacattgcagccttcgagtggatctgctggacgtaaatgacaatgccccttacatcacagtgacctcagagcttggaaccctccccgagagtgcagaacctggcactgtggtggcacttatcagtgtgcaggatccagactcagggtcaaacggagatgtgagcctccgcattcctgaccacttgccatttgccctcaagtctgccttcaggaaccagttctccctggtgactgctggacccttggatcgagaggccaaatctagctatgacatcatggtcactgcttctgatgctgggaaccctcctctcagtacccacagaactattttcctcaatatttcagatgtgaatgataatccaccctctttctttcagaggtcacatgaggtgtttgttcctgagaacaatcgcccaggggacctgctttgctcccttgcagcctctgacccagactctggcttgaatgcgcttatctcctactcactcctggagcccaggaatcgagatgtatcagcttcctctttcatctctctgaacccccagacaggagctgttcatgctactcgatcctttgactatgagcaaacccagacactgcagtttgaggtgcaggcccgggatcggggcaacccaccccttagcagcactgtaacagttcgtctatttgtgctggacctcaatgacaatgctccagctgtgctccgtcctcgggcccggcctggttccttatgtccccaagcactgcctccatcagttggtgctggccacctaatcacaaaggtgactgctgtggacttggattcaggttacaatgcttgggtttcctatcagctcctggaggccccagatcccagcctgtttgcagtctctcgatatgctggggaggtgcggacggctgttcctatcccagctgacctcccaccacagaagctggtcattgtggtaaaggatagtggtagtccaccactctctacctctgttactctcttagtgtccttagaggaagacactcatccagttgtcccagatcttcgagaatcttcagctccaagggaaggagaatctcgtctaaccctctacttggctgtgtccctagtggcaatttgctttgtctcctttggctcattcgtggcactactctctaagtgtcttcgtggggcagcctgtggagtcacatgctttcctgctggcacctgtgcctgtctcaccagatctcgaaggagggaggggcttcccccttccaatgggatcctccgaatccagctagggtcagatgaccctatcaagtttgttgatgtgggaggccactctcatggctgtacacccttggcttctgcacccactcggagtgatagcttcatgatggtgaagtcacccagtgcacctatggcaggggagcctgttcgcccaagctgcccaccctctgatcttctctatgggctagaggtgagacctttgcaggctcaacaaatgcttgagggttattctgatccaggcatatggctaggccatgtcctagagagtactggcctctcagtaagtgcccatagtgatgtcaccatttttgtaagaggtaactatgtggtagacgctgtgctttgtaactgtttcgtgaattaaccagagttgtcacagtttagcattgggggcgggtcatgcctatatctgagtaagaaatgaaagtaattggtgatcaagagccaggctgttgtggaagcatgatgatggaatgtgggagcacaggaggctacagtgcacagggtacagtgcaccaggcagtcacttggacaaaggtggctgttttctctactcttcctgaaagaggggatcagattctgaagtaccttaactctaggttaccatttcccaagggattgaggggaaataaaatctttgtctcccagtatctagtacactgtgaagggacctctctatttgaaacatagagacagcagaaagaggagagaactaaaggaatagagaggcacgcatcagagtggtggcatagatcttttggtctgggtcttaggactcatatcaagtccctactggggatttgaactagatgcggtaaattggaaggttggggcgggttggtcatcacctttggaaaaaacagtaagtgaaatcacttatgtcagaaaactggtttacagttggctgattcatagaaacagccaccctgtgcatctttaagttgagttctcctgaatttggtgaaaccatgaaacctagaagccaagccatccatgcttggcctctgaccaccctcctgggtgacctgattcagccccagaaatgttcccctacccaaaaactgtaacactcattccacatttggggtctggggtgtcagaaaagctaagtcccatgtcagctgacattgagatttccgcaaagcattgctggagagtcagggcaagactttacaaggttcttactaatcttttctctcaccttagcagcattcagcaggatgggggagggtgggggaatacatgggctttgcctctcccagaaggacaagattttgctggttcaagcaaagtggtggaagcttctgaagtcatgcaggaagttgctgggacagaacgctgaggagttttgtatcactttgtcttccctgttgagtaccatctgagctgtcaaactttgctgccaagggggctgaatcaacctgcagcacgaagtgagtggggaggtaggaagcttctgtgacacagatttgcagcctgtgttcccaaggtttccaggattgaggaaactccataattggttgagagcacacagactttttggccaatcagactcagagctgaggtgggagatctgctcttccagcccgcctctcctcctccagctccccagctccactcaaattcagctcccctcccccctgcccacccccgccactcggtgactaagaactgctgcaagcaggcaaacctccgagcagtttttaagaggctggaaggagacataagagacttcagctgctgcattccaagccctgggtctaccttggagacaggacagcacagacttactctccacaaagggacttctgggtcatggggcccaagacactcccacagctcgctgggaaatggcaagtgctgtgcatgttgtccttgtgctgctggggctgggtgtctgggcagcttcgttactcagtggtggaggagtctgagccggggacgctggtggggaatgttgctcaggatctgggcttaaagatgacagatctgttgagccggcggctgcaattgggctctgaggagaatgggcgctatttttccctgagcttgatgagtggtgccctggcagtgaatcaaaagattgaccgagaaagcctatgtggagccagcaccagctgcctgctgccagtgcaggtggtgactgaacaccccctggagctaatccgtgtagaggtagagatcctggatctcaatgacaactctcctagctttgccacccctgagcgagagatgcgcatctcagaatcagcagcatctggggcacgattcccactggacagtgcccaggatccggatgtgggcaccaatactgtgagcttttacactctaagccccaacagccacttctctctgaatgtgaagaccctaaaagatgggaagccattcccagagctggtgctagagcagcagctggatcgtgaagcccaggcaagacatcagctggtgcttactgctgtggatggggggaccccagcccgctcagggaccacccttatctctgtcatcgtgctggacatcaatgataatgctccaaccttccaatcctcagttctacgtgtgggaatcccagagaatgcacccattggtactctgctgctccgcctcaatgccactgatccagacgagggcaccaacggccaactagactattcttttggagaccacacatctgaggcagtgcggaacctctttggcctagaccctagcagtggggcaatccatgtgttgggtcccatagactttgaggagtcacgtttctatgaaattcatgcaagagcccgtgaccagggacagcctgccatggagggccactgtgtgattcaagtggatgtgggggatgtcaatgacaatgccccagaggtgctattggcctctttggccaaccctgtcctagagagcacaccagtgggcacagtagtggggttgtttaatgtgcgagaccgggactcaggtagaaatggtgaagtgagccttgatatctctccggacctgccatttcagattaagccttctgagaaccactactcgctgctaaccagccagcctttggaccgggaggccacatcccactatatcatcgagctgctggccagcgatgctggttcaccttccctacacaaacatctcaccatcaggctcaacatttcagatgtcaatgacaatgcaccccgcttcaaccagcagctttacactgcttacatcctagaaaaccggcctccgggctcccttctttgcactgtggctgcctcagatccagacactggggataatgcccgcctcacctactccattgtaggaaatcaggttcagggagccccagcctcctcctttgtgtatgtcaacccagaggatggacggatctttgcccagcgtacctttgactatgaattgctgcagatgctgcagattgtggtgggggttcgagactccggctctcccccattgcatgccaacacatctctgcatgtgtttgtcctagacgagaatgataatgccccagctgtgctgcacccacggccagactgggaacactcagccccccagcgtctccctcgctctgctcctcctggctccttggtcaccaaggtgacagccgtggatgctgatgcaggccacaatgcgtggctctcctactcactgttgccacagtccacagccccaggactgttcctcgtgtctacacacactggtgaggtgcgcacagcccgggccttactggaggatgactctgacacccagcaggtggtggtcctggtgagggacaatggtgacccttcactctcctccacagccacagtgctgctggttctggaggatgaggaccctgaggaaatgcccaaatccagtgacttcctcatacaccctcctgagcgttcagaccttaccctttacctcattgtggctctagcgaccgtcagtctcttatccctagtcaccttcacctttctgtcagcgaagtgccttcagggaaacgcagacggggacgggggtggagggcagtgctgcaggcgccaggactcaccctccccggacttctataagcagtccagccccaacctgcaggtgagctcggacggcacgctcaagtacatggaggtgacgctgcggcccacagactcgcagagccactgctacaggacgtgcttttcaccggcctcggacggcagtgacttcacttttctaagacccctcagcgttcagcagcccacagctctggcgctggagcctgacgccatccggtcccgctctaatacgctgcgggagcggagccaggtgaggggctcggcgccgccccgggcgacccctgggggcggcactggagaagccgcccgtcctcataagggattgaacttgcatccactcctctccggccggcttggtcgctggctgcgctccacccgattctcgggatcattggaccgtttgcgcgaaaccagagtggccgattaagggatggggctccgagcaccgggggtggtggcgactgtgggcgaggggaggtgggaccgacccccacccctacactcaaaaaaggccggggcctccttcgagcttccggtgaatttcgggcgatttccgcgggtgtcgggggtcccgggaggaggcagtcacagatccacccctgcagccagcctcctaggcgccggctccggcacgcttcgccggtctgtagatttcctcttcgatttctccccagctcccagcatctgtgacttcactgttaccctccctatccccgcatcacccaaccgcacctgtctgcgggacttaggtgtgcgcgcggggctcatgcgtgtcctccctgctggccacccccacggcccacacaagttgcacgggctcgccacgccccgccaacacgtgcgcggacgcacgcacgcactcctcgcacgtgggcttacgcgaataccagctttcactgccactcgctcgcggccagattcacaggcctgttccggtccactcgcagctcccctctgccgctccctccgccgggctcaggagtactcgtagctgattgtgcgcgcctgagggtcccagatcgcggccgcccaggaccaggcgaggactccggagcctcctctcacctctcccacctgcgccccgggctgggccgggtcgcctggggggcggcctgagcgaggcgcggggccaggagcgctggagcgactgccgctctaagtgccgggcgggcaggactctacgatccttgggccagaggtccggatggtcccgggactccgtctcaagggtcggcgacccctcaacccagaagcctcgagcaggcggacaggcagagctgcccagtggccgaggcgcggcagggctccgcgttgggcgagtgagtgagcctctataggacagcaggactgggactccagtggcaccagcggccccttcctcccgcaggaagtgaaagcctcgagcgccctggctctcaacccccagagatacaggcttttggcgccgtcgtgatcacaatgtgcccagcgatctagggtcagagatttggaggtgaccaaactatctgacactctaacaagtcctgtctcctctggcagatggaaagctataggctctgccagatgccagggtgcccttatgtgtgaggaaactacaatagtaaaaaacacaagtttctccaactccaggagcttttattcaaaatatatcaatgcctaactctgctcctaggactgtattttgaaacacccccaggtgattttgatagctgattgagagaaacttactatataactcctttgagaacctcatctcatttgctcttcccaccattgctgttggctaggtactaacatgcctctcttataacagcttcacagaggtcaagtgacttgctcaagttcacagagcaagtaagagagattctaacccctgtctaactccagaatgtgtgcttttaatttcttggcacttggaactttaaaagcttgaggacaggagaggggagttgcctctgctgggattttgcttctgctgggatggggcaagggtggggttccttcccttttaggaccttacatgtggggaaagtcttctgtggctcctcatttctgagcagtccccgcagcgcaaacttggccagttatccttttggagattgagttcccccagctccgtttcctcctatcacaatcactgcatttccatgtagattctgctgtgtctaagaatacagtggctgagggctggccatccctgtgcccttctccatggcagccccagaatggtgctggtgactcccgatacacctggaatgctaggtttctgggttctgctcatatcactgccacctgtgagccttgagtgagccactggcagttccggagcttccttctccctggagtaatctgagatactcacactctctgcttctgggagcaagtatgagtattaattaccagcccaccccagaaccagtgaggaggtggctctaggagtgctccatgagagtgtgtgatgggataacacaccccctggaaagaccagaagggactcaggaatgaagtggctggccagagccccacaccttcagctaggtgggagatggctacacatcagccccttgggagccctggagacttagttggccctgcttggaggctgtgggagctggatccctccccgctgcatcccttccatttttctccgtctcagacagagcagccttgttctcttctccttagtcacagaccattgtctggcacggagttctaggggtgagaagtgtcccgggacttggatgccccgcaaaggcccaatctggcatgactcctaaattaataatgtatttagctgtgggaagagattcttgcaagccaagggcccagagaagatgtccctgtgaatgtgtcactgcacaacctggcaccaaaagggttaccaagaacagcagccatcttgctgcagaggatgctttgttcccagctgaggagttgaataaattcattctagggctggtagaattctcattgaaaagcctcctttgccactttagggggctttgtctgcacctcttcccccagttccacagaagatgccttcagtccttgaattttggctcaggagttctgactctgggggcagggaggaaggggccatttctttaggaaaggagtctcagcttgctcactgtggtcagatgaaatgtgatttatctcttggtttctggtacctcagacctctgagacctgaggtgtattttgtctttggagatgagtccacccctgccccctcttagtccgttttcttctctgtgcccactcccctccttctctcccggcccatccctaggggctcgggtgacattctaacttctcacgggtactcagcccctttccctctgttttctccacagcaagccccgcccaacacggactggcgtttctctcaggcccagagacccggcaccagcgggtaggtgactgattctccagcccaccctcttctctgcggcattttctcagggatgacgtgggaggagatgggggagggcccagcatttgctacagatggcttctccctcagtttgagatcccagggaggtcttggtgtgcggggggctggcacacagaccccggaaggaagaggcgactgccctgactgttcaggaagctcaattcacatgcttgccccttccctcctcgccacgaccggcaccttttcctatcccctgagggcactgtggaaccaaaggatggtcttaagctggtctctgggtgaaagcgaggctttctatgcccatgtactgcctaaccccctcccctgagttgagctgggctccattatgacctggggctcaggcagaaaagcatttgaccggaggaggcggtccgcactcagcgcctcctccagagcctccagagccgaggctgactgcagcctggggagagtggaggcagcacagctggaggtggaactgaggaaggactgggcggggcatggagcaggcccccttctccggcccctcctcccactgtcctctgcccctacttgtcctgctctctgtctgtggggtctccgtgtctctgcccctttttcttgagtttccgtctttgccactttctcttacctctcagtccttccctcagtctctatctcgctttgcaatctctgcctctccctctcttctccatctctgtcttagcttccgtcttgattgctgcacctcagcctcagtccctttcatttgtctacttgcattgatctgtgccgcccactgtgcctgccatggcataagtgctcaataaatgtggagtgagtaactacacgggacccttagtctctttctccttctctatctctgcctccctgtccttgtcctggacctcttttctgtttctcctttcaccgtttcctagcgccttgtgttcttctatccccagcctctatgtttctctgtctctcactatttctgctttcctctctgttctttgtctctctttgtctctgtctctgtatatctttctttgtctctgtctctggtctctgtgcctgttgtctttttctgcctctttctctgttactctttctttatctctctttttcttttatcttgtcttttttctctgagcctctgtctctgtctctcatttttttgtgcttgtgggcaagccagcacacacaaccccccacccaccacccaccaacaccccgctctcttccttccctgcccctcacacactgagcctttgatcgcagctctccaccagacaccctcccatccaagcagccccagctgctcatttcaatctggtatgaattcctgctgagacaggaaccccctgcgggctgaaggggagggaaacttcagcagaaagaccttcagttggtctgagcagagtgggataggctctgcgccaggcctcccagttagaagtcaggagcctggaggagtctcagagcccagggagagaagcaggagcttgggccaccttaccctacctcctcaatggttgagtacttgctgtccacatttgccaagttgctacagatgctgagcttccaagagttatctttcccccatcctgcaaccaaccaaacccttgttgccacaaggacccaggagcccttggtgtatggcagagattccagcttctgggcatgcacagtcctgtcacccattttaggaacgcaaagcgcttcttagaaggcccctaaaaagcagcagatcaaaaggcttgggctgcccttgcccttcctttgaccccagctgttgtccttctccctgctggccttgccaaccttctcataagttatccattaagtcattaatgtattcattcgttcatttattcaacaaatatttatcgagcatctactatgagcagggccctgtgctaaacattgggctataggagtgaacaagtagatgtgatcccagaactcataggcttccagaccagcagaggagactgaaaatttgcaacaagtaacacttaaaaaaaaaaaaaaaggctgggcactgtggttcacgcctgtaatcccagcactttgggaggccaaggtgggtagatcacttgaggtcaggggtttgagaccagcctggcagccaacatggtgaaaccccatctcgattaaaaatacaaaaattagccaggcgtggtggcaggcacctgtaatcccagcgacttaggaggctgaggcagaactgcttgaacccggaaggcagaggttgcagtgagctgagatcacgaaaaaaaaataatctagccacaaatcacagtaagttctgagaggcagagaacaatgtgagtgtaatgggggggggaagatcagagaaggcttctaggaggaggtgacattgagaagttctaggccatttatgttccctctacctaccaccaccccaggccatacactggctttgaagcagaattcaccattgaacctggaagccccaccaactgcctctcatgtgtcctctggggtgagcaccttacccctgcctcaactcccattccatcaaatgagaggcttagtggcctggaatacatgtgggagctcttggagatatggaggagaaggtgcggaacctctctctctctcctctctctgcttccttagttaacttgtggaggatgcaacaaaccttttttttttttttttttagacagagtcttgctctgttgcccaagctggagtgcagtggtgcgatcttggctcactgcaacctctgcctgccaggttcaagcgattctcctgcctcagcctcccgagtagctgggacagcaggtgtgcaccaccacacccagctcatttttgtatttttagtagagatgggtttcgccacgttggccaggctggtttcaaactccccgacctcaactgatccacctgcttcagcttcccaaagtgctagaattacaggtgtgatcgcccccggccacaacaaacatttttgattcagcggctccaaagtgaaataagcgttaggatctagtccagtaacttcaacttctctccttcattcattcaacaaatggtcagtgagcactttctgttggccaggcagtgttctcgatgtgggaggcccctgccctcaaggagtttacagtgcactgaaggagacaaatattgaccaaataattacaaaaataaatgtgagactgaaactgtcataagtgctaggtagaattgtatctggtggtgtgggcgtataatagggatttgatttagggagcaggaggacatcctggaaatgaagttgtgctgagatctgaaagacaaatacaaattaaccagctaaagaaaagaaggaagagcattccagatggtcaggcataccagcttcaaagcagggctggtgttgagttcttcagtaaacttggttcaagatcaagccagctctgggtcacactgcctacacagaaggaagagcattccaaatgggaaaagcctatgcaaaagccttgtggtgaggcctcctgggatcaagggaatggcagggagttttctctttgctggcactggagtgaggggatgaagaggagaggttccttttatccagtctaaccctggttccagccttctgttgatgccctgcctcactccctccccaccatcttgcccactgccctccagcctggtctggtcagacacaccagcttcaaagcagggctagtattgagttcttcagtaaacttggttcaagttcaagtcagcactgggtcacactgcctagacagaaggaagaagacctggccaggtgtggtggctcacgcctgtaatcccagcactttgggaggctgaggtgggtggatcacctgaggtcaggagtttgagaccagcctggccaacatgatgaaaccccatctctagtaaaaatacaaaatattagccaggtgtggtggtgcacacctgtagtcccagctactcaggaggctgaggcaggggaatcgcttgaacccaggaggcggaggttgcagtgagctgagatcacaccactgcactccagtctgggtgacagagcgagactccatcaggaaagaaagaaagaaaaagagagagagggagggagggagggaaggaaggaaggaaggaaggaaggaaggaaggaaggaaggaaggaaggaaggaagaaaagaaagaaaaagggagaaaaaatgaagaagacttacattctgaagttcctgcttggcacatgcttctcctccccaccactatcccttctcaggtcatcctttgggtgtctgatcccaatagctgttgtctcaagctctgagcccagcaaaccatttcccccttcttaggctgtaacccaggccctgccctgcagctgtccccagcctctgcacaaagagtctccatttggtccctagactgttctctgatggctccacactaccatccctcctctgagagacagtatccctgctctctctcagtttgggcagtcattcaacaaacaaatagcaacttaatttttttccacttataaaatagtacatgctcattatagaaacatgaaaaatagaaaaaaaattaaaaggaaaaccacccatcattttacaatctagggagaaccaccaccaactacagtttaatatgaaacatttcaaatatgtacaaaagtagagagaatggtgtcatgaacctgtatgataccactatccagcttcaactaatgccttatcttgtttcacctatatccctacccttatcctgtccttggattcttttgaagcaaatctcagacatcatataatttcatcttggtctccaccatctttaacagatgacttttttttttttttttttttttggagacagagtctcactctcttgcccaggctgtggcacaatctcagctcactgcagccttcgcctcccgggttcaagcaattctcatgcttcagcctcctaagtagctaggattacaggtgtgcaccaccacacacagctaatattttgtattttcagtacaaacagggtttcgccatgttggccaggctggtcttgaactcctggcctcaagtgatccaccctcctcggcctcccaaaatgttgggattacaggtgtgagccaccttgcccggccagatgattctttcataaggtccacattttatatttgagtgagtgtctcttaagtatcttaatgctcttttaatgtaaaagacttcccctccatcttccatttttgcaatttatttgttgaatccctgccttttcatatatatctttctaaacttttctttgtgtaatcaaagaacatgcatgagcttcatttttatttttatttatttatttatttatttatttatttatttatttattgatacgtagccttgctctgtcacccaggctggactgcagtggcgcaatctcggctcactgcaagctccgcctcccaggttcacgccatgctcctgcctcagcctccagaatagctgggactacaggcgcccactaccacgcccggctaattattttgtatttttagtagagacggggtttcaccgtgttagccaggatggtctcgatctcctgacctcgtgatccgcccgcctcggcctcccaaagtgctgggattacaggcgtgagccaccgcgcctggccgagcttcattttaaaaaaatctcattcacctaaataagttgttcacaaacttgtcacactttcatgtgacactttattcacatattaagaactgttattcccagtcatacggtacatttcctactagttttttaaaaatagcaactgaggccatactgtccaacagaattatagcttttttcttctttgcagtgtatcatgagaatttccccatgtctttcaaaattcttcccaagtcatttgcagagtaactcctcttatgaatatacatattattttacagaataagtcctcatatgaatatacatattatttttctaatgctaatgggcttttgctacattagaaaacatacacattcatttacaattttttttttttgagacagtctcgctctgtctccaggctggggtgcagtggcgccatctcggctcactgcaagctccacctcctgggttcaagcaattctcctgcctcagcctcctgagtagctgggactacaggcacgcgccaccacgcccagctaatttttgtatttttagtagagacggggtttcaccatgttgaccaggatggtctcaatctcttgacctcgtgatccgcctgcctcagcctccctaagtgctgggattacaggtgggagccaccatccccagcctcatttacattttaacacaattaaattcagggtgttgtcagggtgacttcctagatttctcagttttttgagcatgatgtagggagtattttattatagtccagtctatgggatattcccttatacacacacacacacacacacacacacacacacacacacacacaccccaaactcaatagggcaagaaccatattcatcatctcttaaatcctaggtcctgtcacaggccactgcttggaaaatagttgactaaatgtagtccatttcttccatttttacttttcactattccccaaatcctggaagagtccctcatatctgctgctggggctccaaggcctccaagctgaagcccagtacgttgttgtgcataagatcataggccctggaatcatattaggctggctttcaggttgcaactctaccagttccagctgtgtgactctggtatagtctctcaacctctctgagccctgttttcatctgttggaaaatatagataatcacaacacttatctgcagggtgattccgaggataaaaaagacaaatatattacccagtcagcttagaataggaagctctcagtaaatggttaaaaaagaggtctctctccctctgctcatctcttacccagcttcacataattggcagcccacccacctgtttggccctcaaccttcaaccatttcccaggacgcctccttacactcctgatcatcatggttccaaccccactgttccactcagctttgttccctcaacaccactgctccctgtgacaggtcatcctcctaacctctggcatctggtcccgttgtctccctgacaacccgcatgctctcctccctgcaacccccgccgcttgcctgctctccctactttattcccattagcccccttcacctggggctgagaacacctggccttgaccctgcaccctcagccaggcccacagagctcagtcgggccggaagtaaggaccccagatattcagttgaggaatttaacattaatacaataatatagaatccaccagcagattttcataaatgttctgtgtgttcttttatccttttttttaatccaggattttatcaaggagcatagattgcatttggttgtcacgtctttcctctcctttaatctggagccagctcccagtctttttatttttttaatgacatggatatttttaaagagtccaggccagttgtactttaaaatgtccccgaacctggatttgctggctattctctgatggttagattcagattacacaccttggtaggaatacttcccgcagcatcacactgggactcatctaacgtcggcctgtcccactatcagtgatgccgagtttgttcgtgtggtaaaaacagtgtcccagatctctccattataaaaatatatttttataaagatattttaaaatatttgtgaaaatataagtaatctgtggatgatactttgagataggcagcaacccttcatgcaattttagtattccctgatgatccttgcctgtatctgtttttacatcagtgattacaaagcggtgatgttctgtcattccttctacatgtatttgctggtattcttctgaaaattacctggatgatttcttcagatttaaattcactgtcttttccttggggaagcctggactggctgagctgcctaaccctgactctctgtcttttttttttttttgacagggagtctagctctgttgccaggctggagtgcagtggcaaccttcacctcctgggttcaagcgattctcctgcctcagcctcccaagtagctgggattacaggcgtgtgccaccatgcccggttaattttttttttttaatatctattttagttgagacagggtttcaccatgttggtcagaatggtctcgatctcctgacctcgtggtctgcccgcccctgcctctcttcataccctctggtagcccctgacacagcccatggcaagtatcacaattgcaattactctattgtgtaattatttaaaatcagcctctcagtgcccaccatgagcaccgtaaagatggacagtttctatcatactcacagccacaaccccagcacctggctctgtgtctggtacatagaaattgctcaagaaagaattgttggaggggcgcggtggctcacgcctgtaattccagcactttgggaagcggaggcaggtggatcatgaggtcaggagttcgaaaccaacctggccaatatggtgaaaccccatctctactaaaaatacaaaaattcgctgggcatggtggcatgtgtgcacttgtcgtcccagctgctcaagaggctgaggcaggagaatcacttgaacctgggaggcagaggttgcagtgagccgagatcgcgccactgtactccagcctgggtgacagagcgagactccagctcaaaaaaaaaaaaaaaagaaaaaagaaaagaaataattattgaatcaatggaaacagaattacaactcttcccacttttgggaaggagaattgagattcctgctttccccttcaaccctagctttatgtttgttgtgatggtatagaggtcacacatggcagccttgtgtctgttcttaggctgagttcatctacttagggacggggaatcccagattgggcaaaaccaaaagcagggacagaccttggaaaaattgtaaagcagttcttggttgtgctcacccaccatgacaaaatatgcacacacacaacgcaacacacacacagacattttcatgccttcaaggcctaccctacagcctttcccatggtgccaaacccttcttcttaccttacagtcacttaactgtctctgctggtctcttcccactcatttaggcaacaaatatttattgaaaaacttctctgagccagatggtgccaaacagttacctaaagggcagactgtgtgtgtgccagggctgtttcccgccaacactcccctgcaaattgaaataatttcatccttggaaattcaaaaaaatcatgaaaattgtcactgtgggaaaattccaagtagagctgaaccttctaagaagcagagagttcttcttatggtttagtatttttttaaattatgaatcatttcatgttttttcaacactcggagtttctaaaagtctcacttaggtccaagtgctaggctttgtgctaggtgcttcagtaggaagcaggtggagtcgctgcctcacagaagccagtgtggtggaggaacagacaggcactacaacagctgcagtgtgactagtgccatgtggggcagccgctgggatgggagtacagtggaggcacctgcccagtctgagtggatctcctctgatatattttattcgtgtcatcatggcaaatgttgggggactggcattctagggaacaccatctgcccaggattcacagcaagagggaacttgagggataggaaagtgcaccttggaaaaggtttgatgatagagtgtttgagggcggggggtgggggttcttgtaaaataggaggggcaggttcttctatggccgtggattttactctgagggcttaggaagccattgaattttagaaatttcttctccctgctccagggtctcttggggcctcctacatctccccctaggtacctcctaggtccccactttttctctagctctggaacattctcttccatttcccaccttcacagtcctctggagaaggtctgatctccctcactatgacaggaagccaggctctctcatggtgggtgggggaatgcactatgttcaatgcattggaccagcctggccaacatggtgaaaccccgtctgtactaaaaatacaaaaattagcctggcacagtggcaggtgcctgtcatcccagctacttgggagactgaggcaggagaatcgcttgaacccaggaggtggatgttgcaatgagccaagatcgcgccactgcactccagcctggatgacagagtaagaccctgtctaaaacaaaaagaaaaaagcatcggaggcagcaaagagctggtttgagggactgacttgtgggattctggcttctgaaggattgtagaagtgcctcctaccttgctgagagaaacaggtcttgggcatggggtagggttagggtactaggtttgggagccctgggagaggacaggaggggcatgagctgtgccggcctgggagtctgtgctcaccatcctactctctccccagctcccaaaatggcgatgacaccggcacctggcccaacaaccagtttgacacagagatgctgcaagccatgatcttggcgtccgccagtggtaagtggtgtcagtgtgtgtatggaagagtgggagacctggggttctggggtgcatctcacagccaccatgcccacggactggatgtcaaacctgtgtagtttctccagatctttcggcaggtctgaaaggacccacaattccaaacataaagcctggaattgtggctaaggaacagcagaggggttgggggtcctgggatgcctggaggagagcgaacaaggaaaagactcatggagggaatagtggttacaagtctagctctggaatgggacagtgtagctcaggtcctagctctgctactatccttgggacttggatcgacttgctcaatctctctaaacctcagtttcctcagcctagaaagtggggacagggaccccaaagggttgttgtagagattaaatgagatgataccacaaagcatagagttctgggcctggcgcttggaagccctcaagcaatgaaagtgggtgtagaaatccccagccgagagaacacctcctctttatgcgaggctcctcttttgctgcccctaactccagagtaggattctggttttcccataaggttgactaagggcttcctttgtaatagagattcggctagtggtggttgtccctgaagagtcactagggcccagagcaggagaagaagaatatcatttgtccttaagagcacagcctaagctgggcgtggtggctcacgcctgtaatcccagcactttgggaagctgaggcaggaggatcatgaggtcaggagttcgaaaccggcctggccaacatagtgaaaccctgtctctactaaaaatacaaaaattagctgggcatggtggtgcgtgcctgtagtcccagctacttgggaggctgaggcaggagaatcgcttgaacctgggaggtggctgtggtgagcagaaaatcgcaccactgcactccagcctgggcaacagtctcgctctgtctcaaaaaaaaaaaaaaaaaaaaagagcacaggctttagaggcaggccaatctggattcaaatcctggcacctggcaccaccacttagcaatgagtccttaggtaagttattaaaccccctcggtttcacttactattaatgggcacagtattaacggatctcattgtggtgttaccagggccaaatgcaagtccctcagcacaggattggcagagagtaagggcacaatatattattatctttgctgacccaaacccgttttttactgggtagaaagcagaattagaataatgcctattaataaagactagcttctggagcagcaaatcctgggcttataaggaggctggcagaggatcaaggcattgccctatatcatgaactgatagccctgccctccagcatgtctggaggactggtgggtagagaaccaggtgaaatcacaagaagcactgtcatcacacctgggcacatactaaacaaactttaggggcctcctgtcaatgaatcctctcaatagctctgcaaggcaggtctgatttctcacactcgacagatgagagaaccgagaaggcacttgccccagggtcctcagttttgagctgccaagctgaggttctaacctggctcaactcctaagtttatgctctttctactatagggaccatggctgcctttggatccagcctcggcttctctattacctgagcaggatgagaggctgtcctcttcctcgagctctgctttattcttccagatcagggttgccagataaaatacaggatgcccagttacagttgaatgtcagataaacagcaagtactatttcagcataagtcagtctcaaatgttgcatgagacataatgtactaaaaaaaaaaatgctcattgtttacctgaaattcaaatttaactgggagccctgtacttttatttactaaatctggcaactctaccccagatgtctgtgaggttaagtggggccaggcctacagctgacggaaggacagagagagaggtggcagggactgctggcctcctgaggcagagctgtcccaggtctggtggggctatgattccagagaggccagagactgagtatgaaagtggcaggcggctgggtctgaggagatgccaagttggcctcttgagggaaataaacaggtatatttagctgttgtggccttgcgccctgaggccaggaagcagctttttagcctaaatccagatgttaaaaacagaaatgaaatcagtatttatggccccaaaccctccaagcaagtcatgcagctcgttcccctgtcaaggcctcccacctttggcccacacagggcctgaccctcgtctaagcctgcgccctggggaacggaccctgggggtggaggtggtgggtcaggccctgctctcactttcacacccgcttcctagccctgaaaccagagaggttcctgaagtccagcccagccaggcctgtggggctgctgagaggggttaagtaagagggagagtaaaaaccgacacttgggaggaggcttttaaaataaacatctgcggggagggatgctctcaaggaggctgcggtttgcagctcagccagctgtgttccagctaatcagcctccttgggctactctggagttgctgccttggccctgggatggggtaggttaagaggacagagggaggtcagggagctgggggctgagtttccctgagtagaggctggcacaggagagaaggcatcacccccacctcgtccaggccagaagatgtccagcttcttgaggctctcctaagtctgcctctcctgggaccaagagaaaatcccggtccttgaccaaggtgggccttggggggagtggggtgtagagggaggggcactggagaactgactctacagaaagtcaaagctggcaatccaacttcttcccctcagatttatagatgggaaaacaggcttgagccacgcagagacttgaccaagctcacacagttccttagtggcagagcagagcaaatattctctttcttttacattctggatttccatatcttctctccctcctggtccagcccaacctcagggcaccccccacgaggtgggcgggggatggctttgtcacttgcacccactcggggtgctactcagagatcttgggtgcacataggacgtgggtgggccgagcttctagctactccgtcaggcccttcctgtcattctgtctctgcctcccttctccctgcttctccgtgttcctcctcattcttttctgtgtgcagggagactacaccccccaccccgctctttctctggcgcctctgaggtcccccctctagcccctaaatcactctggaatcctggctctttgaagccagatctgggcccccctcccctaccccttccattcccaggctgggaaaggctgaagaggctgacggctggaggggagggggcggggcggtggcggatctggcttccttttggagttaattagggaaaacagagaaatgtcagcggaatgaaagggctgggggtgggggccagctggggtaggagaggaggaagtgggcagctgctccctcccactcaacccctctcccccgcccccagaaagctctcagctccggggatttgcgacatgaaatgggggctgtagaaacctgagcgctggtgcgtgaagagaaaaaccgaggcgcatcccggctctcccctcccgtgtgccctcctcctcttatgccggcttgaaaatatttcctgtctctctatttctcaatccctggttgatgtcccaggattactcagcctctccggctttagtcactctcgctacccgctcccagggtccagggtggaggcagagggaggctgggagagaagctctactgccagctgggcctgggctggcctgggcatccctgaggttttaactgtctcctaaccacagaggatctcagggcctccagcagcgagccccaatgagtcaaactcttgtttcctcctctcccacccccgacccagtcagggcaggtgaggggtagaggtgatggcatgctggatgtgacggtgttgatgatgtattgcacaggatgaagcaccatctcatttagtcctcacagcagccttcacagtgcgtacaaatcagctggcaattccgagaggctgcattctaaacaagttcctgggtgatgctgagccagggccagagtgtggacttctctgggccccagtttcttcttctgtacagtgggacgttggactggaggtgctgtctgatgtcacctagctgtggcactctgagcctgtgcctaaagtgtccctgagatgtctagtccccgagatcatcatctcctcagcttcatagagccgagctcttctccatcttctctctacctcccattcactcagaacagggataaggtccaagctgctggtggtgatggtgactgactgtcccttccagcatgcgcttaggtacacttgggcctgaatgcccctctaacaaatgctaccgggtatggccttggtccttctaacacttggttccctcatctgtaaaatgagggtcataccacatagctggctgggctgttatgtagaggttaaaagtgattgtgcatgtgaagcatccagcagagtgcctggcacacagtaggtgctcaaatgctgttttgaaatacaaaaattagctgggctagtggtgtgcacctgtaatctcagctactcaggaggttgaggcaggagaatcacttgagcccaggaggcagaggttgcagtgagccgggatcgcgccactgcactccaggctgggcgacagagcaggactccatcttaaaaaaaaaaaaaaaaaaatgctgttttgaaatggaggcttggaagagcactcttcacccccaccccacacacttactaacggaactaccgaatctctactcgtgccaggccttgcttggcaaaggctaggggcatgtaaagccatggtttcatggctgctgccctccaggagcccatggtctagtgtgggagtcagaggctcccttgagaaagccagggcaaggaactgagagcccgtgtcacagccctgagagaaataccagcgaatgtgttttgagcacttacatctaccaggcactattttacgtacctgacatacattttcttatttagcattcactaaaaccagaagaggtggttaccattatcatccccattttgcagatgagaaaactgaagtggcataaggaggttaggtagacttgcccaggatcacagtgagtaaggaaaggagctaggaatcaaacctagactttctcactccagagcctcttaacctctaccctcaactcttgtgaagagagactaccttggtgacccctatattcccagtgctcagcgtggtcaaggcccagggtgctgtataggcattcattaactgctggggatataagacagtgactgttgaggaccctaagtttagctcccacctgatcttcctctgtctctgcagaagctgctgatgggagctccaccctgggagggggtgccggcaccatgggattgagcgcccgctacggaccccagttcaccctgcagcacgtgcccgactaccgccagaatgtctacatcccaggcagcaatgccacactgaccaacgcagctggcaagcgggatggcaaggccccagcaggtggcaatggcaacaagaagaagtcgggcaagaaggagaagaagtaacatggaggccaggccaagagccacagggcggcctctccccaaccagcccagcttctccttacctgcacccaggcctcagagtttcagggctaacccccagaatactggtaggggccaaggccatgctccccttgggaaacagaaacaagtgcccagtcagcacctaccccttcccccccagggggttgaatatgcaaaagcagttccgctgggaacccccatccaatcaactgctgtacccatgggggtagtggggttactgtagacaccaagaaccatttgccacaccccgtttagttacagctgaactcctccatcttccaaatcaatcaggcccatccatcccatgcctccctcctccccaccccactccaacagttcctctttcccgagtaaggtggttggggtgttgaagtaccaagtaacctacaagcctcctagttctgaaaagttggaagggcatcatgacctcttggcctctcctttgattctcaatcttcccccaaagcatggtttggtgccagccccttcacctccttccagagcccaagatcaatgctcaagttttggaggacatgatcaccatccccatggtactgatgcttgctggatttagggagggcattttgctaccaagcctcttcccaacgccctggggaccagtcttctgttttgtttttcattgtttgacgtttccactgcatgccttgacttcccccacctcctcctcaaacaagagactccactgcatgttccaagacagtatggggtggtaagataaggaagggaagtgtgtggatgtggatggtgggggcatggacaaagcttgacacatcaagttatcaaggccttggaggaggctctgtatgtcctcaggggactgacaacatcctccagattccagccataaaccaataactaggctggacccttcccactacataatagggctcagcccaggcagccagctttgggctgagctaacaggaccaatggattaaactggcatttcagtccaaggaagctcgaagcaggtttaggaccaggtccccttgagaggtcagaggggcctctgtgggtgctgggtactccagaggtgccactggtggaagggtcagcggagccccagcaggaagggtgggccagccaggccattcttagtccctgggttggggaggcagggagctagggcagggaccaaatgaacagaaagtctcagcccaggatggggcttcttcaacagggcccctgccctcctgaagcctcagtccttcaccttgccaggtgccgtttctcttccgtgaaggccactgcccaggtccccagtgcgccccctagtggccatagcctggttaaagttccccagtgcctccttgtgcatagaccttcttctcccacccccttctgcccctgggtccccggccatccagcggggctgccagagaaccccagacctgcccttacagtagtgtagcgccccctccctctttcggctggtgtagaatagccagtagtgtagtgcggtgtgcttttacgtgatggcgggtgggcagcgggcggcgggctccgcgcagccgtctgtccttgatctgcccgcggcggcccgtgttgtgttttgtgctgtgtccacgcgctaaggcgaccccctcccccgtactgacttctcctataagcgcttctcttcgcatagtcacgtagctcccaccccaccctcttcctgtgtctcacgcaagttttatactctaatatttatatggctttttttcttcgacaaaaaaataataaaacgtttcttctgaaaagctgaacgtttctgtataagcgatggaagctcctggcatgtgtgcatgaagtgatgagctgaggtgggtgctggaagaagggcggaatcgggaggccactttgtgtcattgcgcgtctagatgtttccgaattgcgtgtgtgtgtgtgactgtgcaatatggttgtgtatgcttgcaatgccgttgtgcctatgagacagtgtgcgattgtgtgcctatggatctgtgtaccgtgtgccattgtgtgatcggtccgctgtgggggtggggatctgagtgcggcgtgtcagtgtgcagtggagtgtgcagtctaagcttgcggctgtctccaggcagaagaggagaccccggcgcgggcgggggcgggttggcgccgggcaaacgccttgggtagaggggagaggacgtttcgttagttcccgccccttcctgactaaaattgcctacccgaagcgccccggagggcttcacgggaggagggtagactctcctttgcccccgcacccccacccccgctgcctaggggttttgggaaagccgcgggagtgggagggaatgcgggaggtgattcttccaaagccaagtctgcagctcgagcctcagtttccccatctggaattcgccttcccgctgacatctccgtagcgaagcctaagaaattggagggctcatcctcttcttgcgggggtcaaggggactgaaaggacgtgcaggaaatgagatccatcgcagactcagctcccctccctccttcctgtcggtgcttttccactcactcgcctgctctcccatctccccgccccctccgcctgcctcctcgaagcactgtgggattccgaggttgctgcagccagagaagctgcagaaaaacacggagctgggggtgaagggggacttaaaaggggaactacccggaaggacccaagaacacaaagacagagccactgcggttatctggctggtcagcaagggtatgcggcttcctccgcgctgcggaggctcccagagccaggtcacccattctgccagctcaagtctgttgtcatgggaaccaaaccttccaacttaagaatctgggggcgactttctagcgtgggaggaagggtggtgtgcacggttgctgagatggaagcagggttttgttactcagagccaggctgcggaggggcggggtgccgggcgcctgggttctattccaggcacagcagcagactggcagagcgcgtgagcagctgtggtttgtcccctaattggtatgtgtgcctataaagctctgaaccagaaaggcgtggcctccggggggacgggagggaggcggcaggcaacccatccccacacctcaggccatactgaggaggcagctgcccaggctccagggctatttaaaaggcttttatttccagttccagagcccgcccgaatgggtttgtggtcctctccaggcctctccctgtctatcctgggcctgctcattgctggtctggcttttttgtgcaggtcataacg

SEQ ID NO: 454 - DNA, 128096 bp, Homo sapiens; identical to SEQ ID NO: 449
  source 1..128096: mol_type = genomic DNA

SEQ ID NO: 455 - DNA, 117853 bp, Homo sapiens
  source 1..117853: mol_type = genomic DNA
aaaaactaatattaatagtaaaaactcggtataggctatccattattgtattcctgcataccttcttgtagcatttgaataaagctaatacctgaattgattgttgtaaggtagaagtagatgacccaataaatgtttgttattaatgaaaaggacatttcctaaggattgtgtagtgttctactgtatggtgcatattcagtggagtgggagttaacttcatagtttgtgtaccatttggatgcacatttgagaggacaacatattattggcactttgcaattttaaaaactcggatgaaagttgccctggtaggaaagaaaatccttactctccctaaaaatgttggctagttgtttttattaatctgacaaatggactaaagaaggttgaccaatgtccacaaatttatgtaaatgaacttatgagcttcatttatccaattccaaagtcatttcagataggataataatgcaatccactagaatatccctttgtaccttgtattgcagaatagataagcatttccccaataactcttaagaatgaatttatgtactgtaaaagatatgacataagagaagtattttgagatatgaagaagagcaacgtagtagggtatatcatttcttagctacatcatatgggcagtatacttgaatgaatatttcctgaagtagaagagtaaagaaaaattatttttataaagaatgttaatatagtcaggaagaggagatgtttggggattggtataaaattgccacaactttacaaaatagttttaaatagtatagatttccctaatatgtgtaatataaaacactagaaatattggggagttggaaatcatagaaatgaacagaagaatgataaaattgtttccatagctaataaaaaatgaatttttgaaatcagtatagtatgaaggctctgagagcaagaactgtatcatattaattattatattgccagtgacaagggcaatacttagttctagctaagagttcaaggtatgtttgcagaatggtgaaagaatggaccaatgtatgcaggtttgtataaaaacccaacgtgatatttctaacaatttggaaaacagagaaagataccttaaagaagttgttataattttttattaagtatatggacgtaaaaacttggcttgttaagttaggcacacaaaaacaattactgcactggttaacttgaagccgcagaggctgtagtttcctagtgctgactctgggcgccgctgttggccaaagtgcagagcttggcgctccagatctcctcgcgcagccgcagcgcgctttccagggcagccccagctcagactccccagcgccggcctttacaccgcttcctcctcggaaaaagaatcgtttcctaaactggaactggaactaaagcccgttcggagatccaaaaatctacaatacagaggttatttgtaacctggcgtctccaggctggtgagcaagctgaggagagcaagagggatggggagcggcgccggggagctgggccgggctgagaggctgccagtgctctttctcttcctgctgtctttgttctgcccggcgctctgtgagcagatccgctacaggattcccgaggaaatgcccaagggctccgtagtggggaacctcgccacggacctggggttcagcgtccaggagttaccgactcgaaaactgcgcgtcagttcggagaagccttacttcaccgtgagcgcagagagcggggagttgcttgtgagcagcaggctagacagggaggagatatgcgggaagaagccagcttgtgctctggaatttgaggctgttgctgaaaatccactgaacttttatcacgtgaatgtggagatcgaggacattaatgaccacacgccaaaattcacgcaaaattcctttgagctgcaaataagtgagtctgcacagcctggcacaagatttatactagaagtagcagaagatgcagatattggcttaaactctctgcagaagtataaactctctcttaacccaagtttctcattaataattaaggagaaacaggatggtagtaaatacccggaactggcactggagaaaaccttagaccgggaacaacagagttaccatcgtttagtcctgactgccttggacggtggacatccacccctaagcggcaccactgagctccggatccaggtaaccgacgccaatgataatcccccggtattcaaccgagacgtgtacagagtcagccttcgggaaaacgtgccaccaggcaccactgtgttgcaagtgtcagccactgaccaagacgagggcatcaactcagaaattacttattccttctacagaaccgggcaaatctttagtctgaattcaaagagcggagaaattaccactcaaaagaaactggattttgaagagaccaaggaatattcaatggttgtagaagggagggatggtggtggactggttgcacaatgtacagttgaaattaatattcaagatgaaaatgacaatagcccagaagttacattccattctctacttgaaatgattctggaaaacgcggtgcctggaacactaattgctttgatcaaaatacatgaccaagattctggggaaaatggggaggttaattgtcaattacaaggcgaagtcccttttaagattatctcttcatccaaaaattcgtataagttggtaacagatggaaccctagaccgagagcaaaccccggagtacaatgtcaccatcacagccacagacaggggcaagccgcccctctcctccagcataagcgtcatcctacatatcagagacgtcaacgataacgctccggttttccaccaggcgtcctacttagtcagtgtacccgaaaacaaccctcctggggcctccatcgcgcaagtctgcgcctcggacctggacttggggttgaacggccaagtctcctactctatcatggccagcgacctagagcctctggcactggcctcttacgtgtccatgagcgcgcaaagtggggtggtgttcgcgcagcgcgcctttgactacgagcagctgcgcaccttcgaactcacactacaggcccgcgaccagggctcgcctgcgctcagcgcaaacgtgagcctgcgcgtgttggtgggcgaccgaaacgacaacgcaccgcgggtgctgtaccccgcgctgggtcccgacggctctgcgctcttcgatatggtgccgcgcgctgcagagcccggctacctggtgaccaaggtagtggccgtggacgcagactcaggacacaacgcctggctgtcctaccacgtgctgcaggctagcgagcccgggctcttcagcctggggctgcgcacaggagaggtgcgcacagcgcgtgccttgggcgacagggacgcggcccgccagcgcctgctggttgctgtgcgtgatggtggacagccgccactctccgccaccgccacgctgcacttggtctttgctgacagcttgcaggaggtgctgccggatatcactgaccgccctgtaccctctgacccccaggctgagctgcagttttacctagtggtggccttggccttgatctcagtgctcttcctcctggccgtgattctggccgttgccttgcgcctgcgacgctcctccagccctgccgcctggagctgcttccaacctggtctctgtgtcaagtctggacctgtggttccccccaactacagtcaggggactttgccttattcctacaacctatgtgttgcacatacaggaaagacggagtttaatttcctaaaatgtagtgagcaattgagttcaggacaagacatactttgtggtgattcatctggggccttatttccactttgtaattccagcgagtcgacttcccatcctgagttggtgagtttcatttatgtctattctttttcattacccacccaattttctgtatttacatgaaactatcgtacattttcaagtccaatgagttgtcttagggaagtcagagctgctcagaaagctgtcctaccattctttaagaggagcagtaaattgtgagtttttatgtcgcataaaagaagtagccttatagatttacaaagtagtgagagtttgctcttagcttcctctctagcaaaaacatttggtgcgtttttttgtcctctttctcaaagctaatgaattttacctattcgttgtctcattctttaacatgtttatattttattgtatgtagataaaccattaaatttaatgtatgtaatcatttaattcatcttttaaagcaaagaaactgctagtagatgtctttcttcactgatttcactggtagttttcatctctttcttatgttcctcatatatgctttcttattcctacctaatggatttatgattttttgaatctcctaaaattttattaaaaatactatatgttggctgggtgcagtggctcatgcctgtaatcccagcactttgggaggccgaggcggttggatcacatggtcaggagttcaagaccagcctgggcaatatggtgaaaacccgtctctactaaaaatacaaaaattagctgggtgtggtggcgggcgcctgtaatcccagctactcaggaggctaagacaggagaattgcttgaacctggcaggtggaggttgcggtgagccgagatcactccattgcattccagcctgggcaacaagagcaaaactccatctcaaaaaaaaggaaggagaaggagaggaagaagaagaaaaatactacatgttatgtgtatgagagagaaagagagagactgattcactgaacttagaaggtccaaatcatccaaataattttctaagtttatccaggttttcttggatgcaaaatccttttccacctctatataattaccagaagaaacttacaaaaaaaaggaaatgctattgcctgaatttctcttgctcggaatcctgacatattcttgaagaaggggaaaaagacaccggatttgtcttatcgtttggagctttaaatataaatgactggatgttttctcaacatccttgtaggatggaaggtgaatacaggattattccatttttaagacaaaaactactagtcttgtgtacatacaaagctcccattacatggtataagtcttttgcttggtttcccttagtatgtgattcagtaaatgggttccttacaaagtgctgagatttcttataataccacttacttttaacctttcagtagttttctttgttgtatattttgtgttctttttcccaaattattatataagtttaagtgatgcttagaataatgtttaagaccactttaaaattgcataatttattgatgaaggattaaaatagaaacttgcttttcagtgtatatgcatttgaatcattgaaacacagtctgtgcatgcattacatattcacattaaaaaactaagcatttttgaaatagcagaaaagtttaagcaattacaaaaatgtgaaaatttccaactttaatcctgttaatatttagcaatattaggcgagaacatctgtaactattgctgaattaatattacttttataatacaaaaatttaaaataaacgtttttccaggaattttatcatcaaaataaaccccagaaaataatttcaaagtggataatctatccttatatatgtattaatacaattatatattttacatttacaaatatataggtataaaaattaaaaatgaatgtacttccaaacaagattgcacataaaaattacttcagaaaattgttaagatacacagaaaaaattgaagcatcataaaaaggaaattataatagtttacatatctagaaatagagtgcaaagttctaccaagaataagaataaattaatattaagcaatggtttgtgattttataatacacttacagaaattttattccactttatttacaactcagatatctaaaaaatagattgcttttgaaatacaaatgcaagaaacaattggagaaatctaaaatcataattagaagagagtagtgttttctttatcagccatctgatataatgttacacatcagtgggtgtagtaacggcttaggactctgagcgccgctgttgatcaactctaagcgaaaatcaggactccatccggatttccagttctgcggctacacaaaacccggcagataccacaaacctgctcccaggctgcagcaaaactcagcctctttcttctaaggaaaagatcaccatactttgcagggtggaagaaagaacctgatgaagcagcgcgcacagagatccttttgagaaaattccaaagcgaggcagcaatggcagctccaaccaaatgccagctccgcggaagattagtcctgctatgctcgctcctggggatgctatgggaggccagggccagtcagattcgctactcagtgcctgaagagacagaaaagggctatattgtgggcaacatctccaaggacctggctctggagccccgggagctggcggagcgccgagtccgcatcgtctctagaggtaggacgcagcttttctctctgaacccgcgcagcggcaccttggtcaccgcgggtaggatagaccgggaggagctctgtgctcagagcccgcggtgtctggtgaactttaaagtcctggttgaagacagagtgaaactgtacggaatagaaatagaagtaactgatattaacgacagcgccccaaagttccaggccgaaagtctggaagtaaaaattaacgaaatcgcggttcctggagcacgttatccacttccagaagctattgatccggatgttggcgtgaactccctccagagctaccagctcagccccaatcaccacttctccctgaacgtgcagactggagacaatggagccataaacccagagctggtgctggagcgcgccctggacagggaggaggcaactgcccaccacctggtcctcacggcctcggatggcggcgagccgcgtcgctccagcacagtgcgcatccatgtgacagtgttggatacaaatgataatgccccggtttttgctcaacggatttaccgagttaaagtccttgagaacgtgcccccaggcacctggctgcttactgcaacagccagcgacctggatgagggaatcaacggaaaagtggcatacaaattctggaaaattaatgaaaaacaatctctgctattccagcttaatgaaaatactggggaaatatcaacagcaaaaagtctagattatgaagaatgttcattttatgaaatggaaatacaagctgaagatggtgggggattgaaagggtggacaaaagtgctcatttcggtggaagatgtaaatgacaatagacctgaagtgaccattacatctctgtttagcccagtgagagaagacgcacctcagggaacagtaattcttcttttcaatgctcatgaccgagactccgggaagaatggtcaagttgtctgttctatccaggagaatctatcttttacattagaaaattcagaagaagattattacagattgttgacggcccaaattcttgaccgagaaaaagcctcagaatataatatcacggtgactgcaacagacagaggaactccgcccctgtccacagaaattcacatcaccctgcaagtgactgacatcaatgataatccacctgctttctctcaagcctcctactcagtctacctcccggaaaacaacgccagaggtacttccatcttctccgtgattgcctatgaccctgatagcaatgagaattctagagttatttactccttggcagaggataccatccaagggtctcctctctccacctatgtctctattaactcagacactggtgtgctgtatgctctgtgctcctttgactatgagcagtttagagatttgcaaatgcaggtgacggcaagtgacagtggaagcccaccacttagcagcaatgtgtcattgagactgtttgttttggaccagaatgacaatgccccagaaatcctgtaccctgccctccccactgatggttctactggtgtggagctggcaccccgctctgcagagcctggctacctggtgaccaaggtggtggcagtggacagagactcaggccagaatgcttggctctcctaccgcctattcaaggccagtgagccagggctcttctcggtggggctgcacacaggtgaagtgcgcacagctcgggccctgctagatagagatgcgctcaaacagagccttgtggtggctgtacaggaccatggccagccccctctctcggccactgtcacgctcacagtagccatagctgacagcatcccagacatcctggctgacctgggcagtcttcagatccctgcagacctggaggcctcagaccttaccctctacctcgttgtggctgtggcagtcgtctcctgtgtcttcctcaccttcgttatcacgctgctggccctcaggctgaggcactggcactcctcgcatctgctgcgggctaccagtgatgggttggctggtgtgcccacctcacactttgtgggtgtagatggggttcgagctttcctacagacctattctcaggagttctccctcaccgctgactcaaggaagagtcacctgatcttcccccagcccaactatgcagacacactcatcagccagcagagctgtgagaaaaatgagcctttgtgcgtctctgttgattccaagtttcctatagaagacacccctttggttccggtgagttcattttttttctttctttcttttctttttttgttttttgttttgttttgtttttgagacagagtcttactctgttacccaggctggaatgcagtggtgtgatctcggctcattgcaacctccgcctcccaaattcaagcgattctcctgcctcagcctcccaagtagagtagctgggactagagtagagtagctgggactacaggcctcccaagtagaataactgggactacaggcacgtgccaccacgcccggctaattttttgtgtgtttttagtagagacggggtgtcaccatgttggccaggctggtcttgaattcctaacctcaagtgatccacccacctcagcctcccaaagcactgggattacaggcgtgagccactgcgcctggcccttaactttctattatagttagctttctctttaactgtctgtacttaaggtagtataagttgatatcagtgtgtttctcatcacttttcactgggcctaattgttgctccaacactgaaaggaggcatttattagttatatttgctgatataactttcatgttctcataataattaacctgctgtcaacgtaaaccatacttcatggggtagctctcagcctgcattgatgtgggctttttgggtagggttgcttcattggttgcagtggactcatatcataaaattcttactcctttttttttttttttaagagatgggggtgtcattctgttgtccagggtggaatgcagtggtgtgggtaaagcttactgcagtctcaatctcctgggcttatgcaatcctcccacctcagccttcacagtagctaggactgaggtgggagggctagcaagctatgttgcccagactggtctcaaacgatcttcctgcttcagtttcccaaagcactgggtgaggtgtgaaccacctcacccagcaaattcttactcctacgatcatttattcaggtcatactatgtttgtaagggtaaactgataaaaaggtaaatgtattcttcttagagaaacagctgaaagcccagatttattgcttctattcttccatttctatgacaggaaaacacctctttgaggttatatttttcagatcacaagtgtgtaaagtctgtttgtgtttacagatattttctgacgaagattcaaacttcagttatccacttccaaaccctagtaaaccaattttttccctttaatggtgaaagttgtcacatcttttattctcatatcttcaaaggtcttaatttcctaatgctttaatgttaaattatggagaatagtaggacattcttcttttctatagtatatgcttgctcaagagaagtttctaagactggacactgtgaaatgacaaaacaaggaattaaaaatatttctctcacttatatattatttctggctcaattctccaacttttgagtctagaaatgaacttgcatatcagatataatttaagaaaatattctcaggaactgctgggaagattctaaaactattttactgtttttagctataaggaagagaataatgtattatttaatgttattttaaacatagtgttgtttcaaatagtaaataacatttcacaagacatttgaaaataagctttgaagttgactcaaaattctatgctaaacatgtgatccatagatacactgatgactgctggcatttctgtggaaatgaagaattgttttatttgtttgtaattatttgggtttcagttgctttatttttaagaaaaaaaagctgaagtgtctgggaatcctttatgacatacagacattttaattatttcaaacacgttttcccccttaagtgggtagcaaaaaaaataaagcatacttcaggctcatatttttaaccatgcaacaagaaaattgttacaatttctgttctgaggagtagccttcatacttagtatttataaatattgaaatgtatgttaatttggggaaaacataacagatatccatgaaggcttgtatgtcatggtaggtagttactattcgataccacaaaaatgtctcttgcccttaaaaccagaacacgaggctcaccagacagatgactgaatggagtatggaaaatctttatttctgtttttcttaggctatgtaggacttaacttattgtgcattggtaacagattgtagaacataagctgaaagataaaattcttgaccttaatgtctcatcttaaaaagaagcattggttgacattctatatctcgtattacttaaaaataatgggggagcgcagtatatattaaacaaagattggctttgtggtgatcattgttgaaggtggggtgatggctatgtgaaggttcactatatatactccctactgttgtataagtttgaaattgtgcataatagatttatttaaaacacaaagcatagaaatatctactataatattatggtgagagcaaaatttgagggggatgtacacctgcattttcgaagaatatatacatttcggagaccgaattcaaaatgaaaaaccgggctgctgtcccgcacggagcctctgggcgccgctgtcggccagtgcagagcaagcgctgacgccggggatccgtcagcctctggcctgggattccctgcgcagccaacaacagaaagaagaaaaccagctcccacacagagcctcccggctgcgcagacctttcccagcacagcggattgccagctccgagacccgggactcctcctgtcctgggccgaatgctcttttagcgcggtagagtgcactttctccaactggaaaagcggggacccagcgagaacccgagcgaacgatgggagggagctgcgcgcagaggcgccgggccggcccgcggcaggtgctatttcctttgctgctgcctttgttctaccccaccctgagtgagccgatccgctactcgattccggaggagctggccaagggctcggtggtggggaacctcgctaaggatctagggctcagtgtcctggatgtgtcggctcgcaagctgcgagtgagcgcggagaagctgcacttcagcgtagacgcggagagcggggacttacttgtgaagaaccgaatagaccgtgagcaaatatgcaaagagagaagaagatgtgagttgcaattggaagctgtggtggaaaatcctttaaatatttttcatgtcattgtggtgattgaggatgttaatgaccacgcccctcaatttgataaaaaggaaatacatttagaaattttcgaatctgcatccgctggtacacgactatcgcttgaccctgccacggatcctgatataaacataaactcaattaaagattataagataaactctaatccttatttttcattaatggttagagttaattccgatggtggcaaatacccagagttatctctggagaaactcctagaccgggaagaacagagatctcatagcttgatattgactgccttggacggaggggacccaccaagaagtgccaccgctcacatagaaatttctgtcaaggataccaatgataaccccccggttttcagcagagacgaatatagaattagtcttagtgaaaatctgccccctgggtcccctgtgttgcaagtgacagccactgaccaggatgagggggtcaatgctgagataaactactacttccgaagcactgcccagagcacaaaacatatgttctcattggatgagaaaacaggtatgattaagaataaccagtcatttgattttgaagatgtagaaaggtacaccatggaagtggaagcgaaggacggaggtggtctctctacccagtgtaaagtaatcatagaaatccttgatgaaaacgacaacagcccagaaataatcatcacttctctctctgatcagattttggagaattcacctccaggaatggttgttgccctcttcaaaacacgggatctggatttcggaggaaatggagaagtcaggtgtaatatagaaacagacattccattcaagatttattcttcttccaataactactacaaactggtgacagatggagccctggaccgagagcagacaccagaatacaatgtcaccatcgtagccactgacaggggcaagccgcctctttcttccagtagaagcatcaccttgtatgtcgctgacatcaacgacaacgccccagttttcgaccagacgtcctacgtggtccacgtggccgagaacaacccgccaggagcctccattgcgcaagtgagcgcctctgacccggatttggggctcaatggccacatctcctactctatagtggcgagtgacctagagcccctggcggtgtcgtcatacgtgtcagtgagcgcgcagagcggggtggtgttcgcgcagcgcgcctttgatcacgagcagctgcgcgccttcgcgctcacgctgcaggcccgcgaccacggctcgcccacgctcagcgccaacgtgagcctgcgcgtgttggtgggagaccgcaatgacaacgcaccgcgggtgctgtacccagctctgggtcctgacggctccgcgttcttcgatatggtacctcgctctgcagagcccggctacctagtgactaaggtggtagcggtggacgccgactcgggacacaacgcctggctgtcctaccacgtgctgcaggccagtgagcccggactcttcagcctggggctgcgcactggggaggtgcgcacggctcgagccttaggcgacagggacgcagcccgccagcgcctgctggtcgctgtgcgtgacggtggacagccgccactctctgccaccgccacgcttcatctggtcttcgcagacaacttgcaagagatactgccagacctcagcgaccgccctgtactctctgacccccaggctgaactgcagttttacctggtggtggccttggccttaatctcagtgctcttcctcctcgccgtgattctggccattgccttgcgcctgcgacgctctctcagccctgctacttgggactgcttccatcctggtctctgtgtcaagtctggacctgtagttccccccaactacagtgaggggactttgccttattcttataatctgtgcattgcacatacgggtacaaaagagtttaatttcctaaaatgcagtgtgcccctacattccaatgaagacatggtttgcagtgtttctcctggagccttaattccacctcatggtggggaggatttgacttcacatcctgagactctgacttcggtgagtttctcttttttgtgtgtgatttatctaatagtctactagtttctcatattttaggcatactactttattttcatatctagaatcatatgtttaaaatccatagctttttacaatattttctcaatgttttttcaattatagttttcactatgtatttggttcataagttgctctatctttttgtaaaataatgtcaccagactgaagatattttgtctttgtcttttttttttttttttttttttgagatggagtctcgcactgttgcctaggctggagtgcagtggcgtgatctctgctcactgcaacctccgccttctgggttcaagcgattctcctgcctcagcctcccaagtagctgggattactggtgcccctcaccacagctaaattttttgtatttttagtagacatggggtttcactatgtcgaccaggctgttcagaaactcctgtcctcgtgatcctcccaccttggcctctcaaagtgctgggattacaggcgtgagccacaatattttgtcaagttctgactatcgaacagaagcagtggtcttggcatctaagaaaacaaacaagtaacctatctattcaaatttgcgaagacttagtgaatttacgatatcttatttatatatttttaaagcctaaaaatattcagaagacaggcccagtggctcacacctataatcacagcactttgataggctgaatcggaaagtatcacttgagcccaagaattgagaccagcctgggcaatatagggagaccccccatctctactaaaacaacaacaacaaaaaaaaacattagcagagtgtggtagcattcccctgtggtcccagctacttgggaggctgagctgggtggattgcttggtcctgggaggtcaaggttgcagtgagccctgatcttgccactgcactccagcctgggcgacagagtgcgaccctgtctctaaaataaataaataaatatgcaggcagggccaagtgtgctgtaatcccagcactttgggaggtggaggtggagaatctcttgagcgcaggaatttgagaccagcctgggcaacacagggagactccatcgctacagaacatttaaaaattagcagggtgtggtggcacatgcctgtggtctcagctactctggtggctgtggtgggagaatcgcttgagcccaggaagtctaggctgcagtgagctgtctaggtgacagagtgagaccctgtctcaaaaaaaaaagacatttctaagaaataaatgaaatactattgcctttgcactcagtctctgtctctgattctctgatagaagatttttgaagaaaaaagataaaatctttgaagagttctatacttggaaggcatagtgacataaacacttctgaacatcctgttctctgtgtgaaagaagtgaacttctataccctttgcatttgagggaacaattgctactgggttgatgggcacacacagttgaagatatgtgaaccactggactttggcctctgatacaaactgcctaagagaagagattatttatactggtattaatgctctgatgaaaacaggtcatttgacataaacacttacttgttaaaaacctatatcactacatctaactttgttttctaaaacttttagtacttcaaattctacgtatttcttttctcattacaatgcaaacagtttaatttgcaactgtaatatatgttcattttagtttgtgattacctgcttaatcatttaaataggtccatttaacttgtatccctgtaagataaagtatgttttacacaaaaaggttaattaaggctcagtaaaactattctagaagagtactttaaaaacctcttacacaatcctaagctaaataagtttaatgaattaagtagttacaattataaagcttcagagtgaattatctcatgagtttatttaatataatctttgtatgaatgtatactaaataaaattggcctattcaaatcacaattttaaattataagacttttctgaatttacctagacactaatatgacctaaaataagtattatttaccttttattaaagtgtgtacatttctgttgggaaaacgtgttgcaaatatatatttaaccaaacattatcttgaaatatttacaatattttcactccactttatcacacctcccctaagaaacctacatatagtaaattatttaaagataggagtggagaaaccaaagaatctatgtaaaatataataatccaacagaatagtttactttccattgcatgtatcacttgggtgcagtaacttcttaggactctgagcgccgctgttcacctactaggagagaaaacgcagccagagctcaatccggattctcagggcttcaactacacaagccccacaaaccggctgctgggctgcagggaagctcactccagaatttaaagtgcccaggctacagagacaccctgaagccacagaaagacaaaggaaccggttgaaacacacaacgtgtccagtgaggactttgcagaattctgtaaccagactacaatggccgctcaaaggaatcgctcaaaggaatcaaaggattgcagcgggctggtcctgctctgccttttcttcgggattccatgggaggctggagcccggcagatctcctactcaattcctgaggaattagagaaaggctctttcgtgggcaacatctccaaggacttgggtctggcgccccgggagctggcggagcgcggagtccgcatagtctccagaggtaggacgcagcttttctctctgaacccgcgcagcggcagcttgatcaccgcgggcaggatagaccgggaggagctctgcgctcagagcgcgcggtgcgtggtgagttttaatatccttgtggaagacagggtgaaactttttgggatagaaatagaagtaactgatatcaatgacaatgctccaaaattccaagcagaaaatctagacgtaaaaattaatgaaaatgtcgctgcgggaatgcgttttcctctcccggaagctattgatccggatgtgggcgtgaactccctgcagagctatcagctcagccccaataagcacttctccctaagagttcagagccgtgccaatggcgtcaagtacccggagctggtactggagcactccctagatcgcgaggaagaggccattcaccacctggtcctcaccgcctccgacgggggtgaccctctccgatctggcactgtccttgtcagtgtgactgtcttcgatgcaaatgacaacgcgccggtcttcaccttgccagaataccgagtgagtgttcctgagaatttgcctgtgggcactcagctgctgacagtcacagccaccgacagggacgaaggtgccaatggagaagtgacatattcattccgaaaattacctgacacgcaattgttgaagttccaactaaacaaatatactggagaaataaaaatatcagaaaatctagattatgaagaaaccggtttctatgaaatagaaatacaagcagaagatggaggagcatatcttgcaactgcaaaagtgttgattacagtagaagatgtaaatgacaacagtccagagctgaccatcacgtctctatttagtccagtgactgaagattcacctctgggaacagtcgtagcccttttaaatgtgcatgatttagactctgagcagaatggacaggtaacctgttccattttggcgtatctaccatttaaattagaaaagtccattgacagttattacagattggtgatacacagagcccttgacagggaacaggtatcctcttacaatatcacagtgacagccacagatgggggaagtcctcctctatcaacggaagctcactttatgctacaagtggcagatatcaatgacaacccacctaccttctctcaagtctcctactttacctatatcccagagaacaacgccaggggtgcctccatcttctcagtgacagcgctggacccggacagcaaagagaatgcccagattatttactccctggctgaagacaccatccagggggtacctctgtcctcatacatatccatcaactcagacactggcgtcctgtatgcactcagatccttcgactatgagcagtttcatgagctacagatgcaggtgacagccagcgacagcggggatcctccactcagcagcaacgtgtcgttgagcctgtttgtgctggaccagaacgacaatgcgcccgagatcctgtaccccgccctccccacagacggttccacaggcgtggagctggcgccccgctccgcagagcccggctacctggtgaccaaggtggtggcggtggacagagactccggccagaacgcctggctgtcctaccgtctgctcaaggccagcgagccgggactcttcgcggtgggggagcacacgggcgaggtgcgcacggcgcgagccctgctggacagagacgcgctcaagcaaagcctcgtagtggccgtccaggaccacggccagccccctctctccgccactgtcacgctcaccgtggccgtggccgacagcatcccccaagtcctggcggacctcggcagcttcgagtctccagctaactctgaaacctcagacctcactctgtacctggtggtagcggtggccgcggtctcctgcgtcttcctggccttcgtcatcgtgctgctggcgcacaggctgcggcgctggcacaagtcacgcctgctgcaggcttcaggaggcggcttgacaggtgtgtccggctcgcactttgtgggcgtggacggggttcgggctttcctgcagacctattcccacgaggtctctctcaccgcggactcgcgaaagagtcacctgatcttcccccagcccaattatgcggacacgctcatcagccaggagagctgtgagaaaaacgatcctttgtctttgttagatgattcgaagtttcctatagaggataccccattggttccagtgagttttattttcatttttacttttgttaaaaaaaaaaagattggtttttactttgaagtttgcggcatgatggtggaaagtgtaaatgctaaaacactgatgagtagaatttgatgtttattaaggttttttttttttttttttttttttttttttttactttctggtaaaattcacctagtctcaatcaaggcctatatatcataaggctttgttatgattagctttgcagaaccttgtagtttatagtgttgttgagtacaatattgacaattcctaagacagacttccatacagaagtgcctgtcaatttatatttcctcctgggtggtcacatattgaaactccagccccttaagcaaccctcttgttctgaaggcaggtctggtaagaataggtaagtatcagaaagaaatcacctctggaaacacaacccaaatccaagaatactcaatgcagttcttcccaaggagaagggcaataggcctttttcaaactacattttatatatttttcaatctatactttgtggtgatagttgcagttgaatatactaagtttttcattaatattgaattaacaatttatttataacaatgtatgcttagatttttccagccctatttataactgataacactgcagtatcctttttgcatacaattctctaatttcacactgctatgtggaagatatagcattttaatttaactttcattgctcaatagggatcctgaggaggctatagagggtgaaattaagaatatttgggattctgcttttgtcttttttgttaaattttctagtgactaaggctgaaagtaaatatgggttgggaagacagataaatttgtacatgttcccgagaacaggagcaagagatatatgacaaagctatttcagtggctctttaatgtataaggaggcaaacacctgaaactctgaaaactctgaaattgagaggcaaaataaacttagagtcaagaaagaaatgccatttctgcagatcagaatataaacaccaaccacagctgtaaaaaagaaaagaatatatgcaacgaagggaaattatataaacaaaggatcattggaggtactgatgagttcatttagttcaatgaaaatagtgacgtattaggtagatctcttaattttattactagtattctactaaatgtggtagtataaagtcaaaaagcattccgaagtttctcaagacccttataattccatgatttttttcaggtcagtcaacatttgttgaatgataggtctgtggaaggaaagcacactctttagggtcatagttattaactattaaaccattgaaactattattttatatttgtgttaatgagagtcaaaattattgtgcattcatctcaaataattctattattttgaaaaatacaggttttttttttaaaaaaaactgctcttgacattgtagctattgtgagaaaatattttgattataattatttaaaagcaatacaggacaccctggatgatggtaatgactagggcaatggttgcattccagtacttaagtatgaaataaggaattattactttctgggtgaatataggctagaattgaagacaaaaaaatttgttgcttatcttcagtacttccagcttcatagataattactcttaaaaggaacaagaatgactgcctctggatggaggaattggatagcaatgggccgtgggataggagacctataaaccttcatgctatattattttgtgcctttttaaattttgaagaaaaaatattcatttattcaagatatatgtaaattcagtaaataaaaagatatgatagttatgaccaagtggaaatatatttcctgatgtaaaaggaatcactgaggaaaaagattaaaatattttggctgtcaactcgtagtttaaaaaaaattccttgaaagaggtagagaaaagtcaagttgcagtcccacacagagcctctgggcgccgccgtcggccagtgcagagcaagcgctgacgccggggatccctcagcctctagcctgggattccctgcgcagccaacaacagaaaagaaaaccagctcccacacagaggctcccggctgcgcagaccttgcccagcacaccagattgccagctccgagacccgggactcctcctgtcctgggccgaatgctcttttagcgcggtagagtgcactttctccaactggaaaagcggggacccagcgagaacccgagcgaacgatgggagggagctgcgcgcagaggcgccgggccggcccgcggcaggtactatttcctttgctgctgcctttgttctaccccacgctgtgtgagccgatccgctactcgattccggaggagctggccaagggctcggtggtggggaacctcgctaaggatctagggcttagtgtcctggatgtgtcggctcgcgagctgcgagtgagcgcggagaagctgcacttcagcgtagacgcgcagagcggggacttacttgtgaaggaccgaatagaccgtgagcaaatatgcaaagagagaagaagatgtgagttgcaattggaagctgtggtggaaaatcctttaaatatttttcatgtcattgtggtgattgaggatgttaatgaccacgcccctcaattccggaaagatgaaataaacttagaaatcagtgaatccgtcagcctggggatgggaacaattcttgagtctgcagaagatcctgatattagtatgaattcgctgagcaaataccaactaagtcctaacgagtatttctcattggtggagaaagacaatcctgatggtggcaaatatccagaattagtattgcagaagactctggaccgagaaacgcagagcgctcaccacttggtactgaccgccttagatggtggggaccctccccgaagcggtactgctcagataagaatcctggtaatagatgccaatgacaaccccccagtgttcagccaggacgtgtacagggttagccttcgggaagacgtgcctccaggcacctccatcctgagagtgaaggccactgaccaggacgagggcatcaactcagagatcacttattccttctttggtgtggctgacaaagctcagcacgtgttctctctggattacactacaggaaacattctaactcagcagcctttggattttgaagaagtagaaagatatacgataaacatagaagcaaaagaccgaggatctctctcaacacggtgtaaagtaattgtagaagttgtagacgaaaacgacaacagcccagaaataatcatcacgtcactctctgatcagattatggaggattcccctccaggagtggttgttgccctcttcaaaacacgggaccaagactcaggggaaaatggggaagtcaggtgtagcttaagtagaggtgttccatttaagattcattcttcttctaataattactacaagctagtaacagatgaggccctggatcgggagcagaccccagagtacaacgtcaccatcgcagccacagacaggggcaagcctccgttatcctccagcaaaaccataaccctgcacattactgacgtcaatgacaacgcgccggttttcggacagtcagcctacctggtccacgtgccagaaaacaaccagccgggtgcctccatagcgcaagtcagtgcctctgacccagacttcgggctcaacggccgtgtctcctactctctcattgccagcgacctggagtcacgaacgctgtcgtcctacgtgtccgtgagcgcgcagagcggggtggtgttcgcgcagcgcgccttcgaccacgagcagctgcgcaccttcgagctcacgctgcaggcccgcgaccagggctcgcccgcgctcagcgccaatgtgagcctgcgcgtgttggtgggcgaccgtaacgacaacgcaccgcgggtgctgtaccctgcgctgggtcccgacggctccgcgctcttcgacacagtgccgcgggccgcgcagccaggctacctggtgaccaaggtggtggccgtggacgcggactcggggcacaatgcctggctgtcctaccacgtggtgcaggccagtgagcccgggctcttcagcctggggctgcgaacaggcgaggtgcgcatggtgcgtgctttgggtgacaaggactcggtccgccagcgcctgctagtcgctgtaagagatggaggacagccacccctttcagccactgccacgctgcacctggtgttcgcagatagcttgcaagaggtactgccggatttcagcgaccatcccacaccctctgactcccaggctgagatgcagttttacctggtggtggccttggccttgatttctgtgctctttctcctcgcggtgattctagctattgctctacgcctgcgacagtctttcagccctactgcaggagactgctttgagtcagttctctgctccaagtccggacctgtgggtccccccaactacagtgagggaacgttgccctatgcctataatttttgtgtgcctggggatcaaatgaatccagaatttaattttttcacatctgttgatcattgtccagccacacaagataacctcaacaaagatagcatgctactggctagcattttaactcccagcgttgaagcagataagaagattcttaaacaggtaagtatttaaaaatgtatttaatcctttttatattacaatatgccaatatattccaatatagtggtattattttaagattctagataacttcttcatagagttcgcaaaatataggtcaaatttatggttatcattattaaaacaaaagtttaaattaaatgcctcagtcttcctactattcaaagacattttaaagcaaactacatgggtaatctccggtgacatttttatgaagtaaaatacctttcggttaaaaatataaaatacaggtatatttttacggcatggtattttaattgaaaccctgatgctactcaatttttctcaagtatttcatcttcatttactcaataaaggaaccttgtaagaattatagttaggcatcctacctgatgattttatcgggaccgtattatttccacttccagaaatgtcgttcctttcagtcggttaaaatcaattggaaccaactacaacctacaagttttcagctccagtaatattttgaaaactttttaaaaattaagcaagcccttttaataattactcctttcgcaggtgttcttggtaaagttttaacgtcacataatgtaagtattgtgtatcatcgtttttaagctctacaaatacgtgtgattcacaaaggtgagcgtaatcatttcttctggaatttcttagtcgttgcaataataagaatgggctctaggcgccgctgctcaccaatcagggaatgggaagctgcgcgccattgagtccctccctcccccgcctctaccacacaaagcggaatgagatggatactcacagatcctgacactggagacttagaagtattttccttcgctttctgatatattttggatgtagtcggcctaggacttcatagatacataagccgattcacaaccaaccagctcgagaaaccgcggaatatcggcttagagcctgccatggcgaatcggctacagcgcggggaccgcagtcggctgctgctgctgctgtgcattttcctggggacgctgcgggggttccgggccaggcagatccgatattcggtgccagaagagaccgaaaagggctccttcgtgggcaatatctccaaggacctggggctggagccccgggagctggcgaagcgcggagtccgcatcgtctccagagggaagacacagcttttcgctgtgaatccgcgaagcggcagcttgatcacggcaggcaggatagaccgggaggagctctgtgagacggtgtcctcctgttttttaaatatggaacttctcgtggaagacaccttgaagatttacggagtggaggtggaaataatagatattaatgataacgcccccagcttccaggaggacgaagtggagataaaagtcagtgagcacgcaattcctggggcgcgatttgctcttcctaatgctagggatccagatgtgggcgtgaactccctccagagctaccagctcagccctaataattacttttccttgcaactgcggggcagaacggatggggccaagaatccagagctagtactggagggaagcctggaccgagagaaagaggctgctcacctgctcctcctcacagctttagatggaggcgatcccatccgaaagggcgcagttcccattcgtgtggtggtcctcgatgtaaatgatcacatcccaatgtttacacagtccgtatatcgcgtgagtgttccagaaaacatcagctccggaactcgggtgctgatggttaatgcaacggatccagacgagggaatcaacggggaagtaatgtattcatttcggaacatggaaagcaaggcttctgaaatattccaattggattcacaaactggagaagttcaagtacgggggtctctggattttgaaaaatatagattctatgagatggaaattcaaggccaagatggtggaggtctctttaccaccacgacgatgttgatcactgttgtggatgtgaatgataacgctccagaaataactatcacctcttctattaattcaattctggaaaactctcctccaggtacagtgattgctcttctaaatgtgcaagatcaagattctggagaaaatggtcaagtctcctgttttattcctaaccacctgccttttaaattagaaaagacttatggaaattattacaaattgataacaagcagagtgctggacagggagttggtccagagctacaatataacgttgacagccacagaccagggaagcccgcctttgtctgcagaaactcatgtctggctgaatgtggcagatgacaacgataaccctcccgtttttcctcactcctcttactctgcctacattcccgaaaacaaccccaggggtgcctccatcttctcagtgaccgccctcgacccggacagcaaacagaatgccctggtcacttactctctgacggatgacactgtccagggggtgcctctgtcctcctatgtctctattaactccaacactggtgttctctatgccctacaatccttcgactatgagcagtttcgagacttagaactgagagtgatagcacgtgacagcggggacccgcccctcagcagcaacgtgtcgctgagcctgttcgtgctggaccagaacgacaatgcgcccgagatcctgtaccctgccctccccacagacggctccactggcgtggagctggcgccccgctctgcggaacctggctacctggtgaccaaggtggttgcggtggacaaagattcaggccagaacgcctggctgtcctatcgcctgcttaaggccagcgagccgggactcttcgcggtgggggagcacacgggcgaggtgcgtacagcgcgggcactgctggacagagacgcgctcaagcagagcctcgtggtggccgtccaggaccacggccagccccctctctcggccaccgtcacgctcaccgtggctgtggccgacagcatccccgaagtcctggcggacctcggcagcctcgagtctctggctaactctgaaacctcagacctctcgctgtacttggtggtggcggtggccgcagtctcctgcatcttcctggtctttgtcatcgtgctgctggcactcaggctgtggcgctggcataagtcacgcctgctgcaggcttctgaaggcgggttggcaggtatgcccacgtcacattttgtaggcgtggacggggtacaggctttcctgcaaacctattcccacgaggtctctctcattgcggactcgcagaagagtcacctgattttcccccagcccaactatggggacacgctcatcagccaggagagctgtgagaaaagcgagccactcttgatagctgaagactcagctatcattttaggcaaatgtgacccgacaagtaatcaggtgagatttatttctctgcctcctaattgttggtgtcttggcacaagtcttttaaggagatgttttttgagcctgttatgaaaactgtttggggggggggtggggcggcatatatttagttcatatatatttagagcaatacatgtgagttttactttgcctttcatgagattacgataatctttcagaacgtttttgtgaaagtcatttttcaatcttggcatattttcttttgatttcaaaggggccattcaactatgctggtttggtttgaagtaagttgaattttagtattatttttctattatcagtgtatgaggctctcaatttattatatatagatacaaattaatgattcacaaacactttttatttccatttcaattttgctgtgccttcactgatttgtagttatattccaccattatttgctattactgctaatgttcaaattttgatcctgttgatttaatagcatgctccctctagctctccttctcatctatctatctatacacatgcacacacacttatacacgtaagcttttctctgagcaattttattttgattcttggtggctggtaatatgcttagatcctgttgactatttcaactttgtctcatttcttcatcctatcaacacagacatattgactggcttttaactactggatttccttgggagataaaatttagatcacattttttcttaagctctagatgtcttttccattactatggtgaagttacattgactgttctgaggaaataattgaattattgaactggtattatttccttttattcttttactttggtgtctgtgtttgtatgtatggaaggttttttaatgtagtaaatccatatatagaaataacttgattttgattcagtgcttctcaaaaacctattttcaaatgtgctaaagatgtctacagatttattcaaatagagtagtttgtgaatatataaatagattgaaggtatttggactttaattaaactgatttagctagtatccttctggctatttttttgttcattttcagtgtagttgggagtcatagattccttctttctttctttataaggtcattcttatggcaaatagtacattcagttcttttattcagaccaacttgttattgaagcttgatagttgcctgacatacatgttatctgaagcaatgtctaggaaagccaaatgaggaaaggagacttatctagggtttttgatcacaggaatcatttccataatcaattcagtcaacactctcacatcacttctaggtatttgccccaaattacttggatatttatgttccctttcaagtttagttttctcatttaggaatttaccttatgtcattagttgtaaactgactatctagggctcggacaaaaataatttcaactgtaggaaaggcaagtcttccaacagatgcctacatttttcttgaagtcaagaaaaatgttcaggtattttgagcatctagggataggatttatacttgtggaattccaaactgagaaaaatgatgtaaggcattgtactttgactggaattagttaaataaaaaggatatgaggtatttggctgggaaaaggagattgttccatattataaaacctcatctaaactaacttcccaagatcgtggagaacaaaaaggaagggttggctttgaaatgtgatattaagagggttatgttgattcggaggtagtgataaagttctgttaaggtataacatatagtcccattaaatagaggataaaaataaaacaccatcacatttcatgttattaattcctatggcaacctactaggctatacctttatattctctttatgatgaaacatgaaacaataatccttttcagaaacctcttttataagtgataagaagggtttggctaactttattctgaatatgccctatatagctttcagtgctcctccagttttctctgataaaactaggaggaaaattatctgcacatcagattgaaaataatactgcatatcatttcatagtggtcaaaattttcccataccacttgatggggatgttttcccacaaggtttttgttctacaacaggagagaagactttgcctagttcttccaatatgtgcattgcttctgcttagaaaaaaacaaacttttaaattctctttgctgggttaatgactgttctatagattcccatctctaaggaatcttctttggtagtaaacactggaaaacagtcactacgaaaactcataaaatgtctagtttcctatacattagtccaacacatcagtctaattctgaatcccattgaattagcaaaggcttccggctgcagttttctaaatagactcagagccctgctgttggccaatgtgctgcaagaactggagcctgggatctaccaggacgatattctgttcagtcacagaagcaagtcggagagtggccaagacttgggctttctgctcctgcaaatctgattccatacggattggggtgccctcaaactgggagcattgagttttctatgtatggaagtaaatattttaaaagcactttgtgaaacattttctcttaacgtcggagactgcagcaacgcatgggaaggatgggaaacagggtgaagcagagaagcaggacccggcagtggcaagcactcttccctttcctgctgcctttgttctgcggggcaccctcggagcagatccgctactctattccagaagaaacggtccagggctccgtggtggggaaccttgcggaggacatgcggctgcatgttcaggatttattgacctgaaaccttagagttagtgcagagaaacaatactttaccgtgaacacggagaatgggaacatacttgtgagtgacagaatagatcgagagtcactgtcttcaaaatcctctgtgtcatacccttagagattgtagcagagaatcctctaaatgtttttcacataaatgtgatgatagaagatataaatgataacccacctcattttccccaaaatagcattgttttacaaatcaatgaactagcaattccaggcattcggtttggcctggaatctgctatagatgcagatgtagggcctcactctctccagagttaccagctcagttctaatgaacatttctctctgatgatggacaagactaaaggcaagaacgctccagaattagtgctggagaagcccctgggccaggagcaacagagctctcatctcctggtcctggaagcaatggacatgggtgacccagtcccaactggcactgctgcaattcaaattgaggtcactgatgccaacgataatgccccagtttttagccaggatgtatacaaagtcagccttagagagaatgtgcccccaggcacctctgtactaaaggtgacagccactgaccaggatgagggtgtcaatgcggagatcacctactctttcaaatccctacgagatgatattggaaatatgtttgtgctagaccatcaaaatggggaaattaaatccaaagacttaatagacttcgaatttcgtagcagttataccatgagagtagaagctaaggatggtggaggcatgaccagcgaatgtaaaattatactagaaatcctagatgagaatgacaatgccccagacgtggtttttacttcagtgtccagttctgtaactgaggacgcagaaccctggacggtgatcactctgttcaaaacacatgataaagattcgagagaaaatggggaggttacatgcctcataaacgaaagagttccttttagaatcgaatcttccgccaataatgactataagcttgtaacagatgggaccctggattgggagcggatcccggagtacaacgtcaccatcactgccactgacaagggcaagcctccgctctcatccagcacaagcctcaccctacgcattggtgaagtcaacgacaatgctccggttttccaccaagtctcctacgtggtccacgtggccgaaaacaaccttcccggagcctccatcccacaagtcagcgcctctgacctggacctagggctgaatggccaagtctcctactccatcgttaccactgacttggagctgcgggcactgtcgtcctacgtgtccgtgagcgcacagagcggggtggtggtcgcgcagcgtgccttcgaccacgagcagctgtgcgccttcgagctcacgatgcaggcccacgaccagggctcgcccgcgctcagcgccaacatgagccggcgcatgttggtgggcgacctcaatgacaatgtgccgcgggtgctgtaccccgcgctggggcccgatggctccgcactcttcgatatagtgccacgcgccgcagagtccggctacctggtgaccaaggtggtggcggtggacgcagattcgggacacaacgcttggctgtcctaccacgtgctgcaggccatcgagcccgggcttttcagcctggggctgcacacgggaacctgctggttgctgtgcgtgacggaggacagccgccgctctctgcgccgctacgcttcacctagtcttcgcagacagcctgcaggaggcactgccagacttcagtgacagtcctgtgccctctgattcccaagcaaagctgcagatttacctggtcgtggccttggccttgatttctatgctcttcttcctcgcagtgattttggcggtcgccttgcacctgcgatgctcttccagcccctctgcctggggttgctttcaccctggtctctgttctaagactagaccaggggtttttcccaactacaatgagggaactttgctttattcctgcaatctgtatgttccctcggattctagaaaaagaagatttaattttctcaccatgacaccagaaacagtccccccacaagatctttctaatgaagtttctctggtagcaagcttcactgaagagaataacaagataagctctaactctgttgctcctactcacgtgagttccaatgaatgtctttcatttacaaatggatgaggtttaattttcaaaccaatattttggcaagaaaatcttaaacatattatatctactattgcttcaggtttgtttgcccactcttaatatttcctgttcctttctgtgtgggccagtaacttcattattagctttcatgtatttttgaaacattttcaccatttttacgggagactttttttttttttggacggagtctcgctctgtggtccaggctggagtgcagtggcatgatctcggctcactgcaagctctgccttccgggttctggccattctcccgcctcagcctcccgggtagctgggactacaggcgcccgccaccacgcccggctaattttttgcatttttagtacagacggggtttcaccgtgttagccaggatggtctcgatttcctgacctcgtgatctgcccgcctcggcctcccaaagtgctgggattataggcgtgagccactgcacccggcccggagacattgtttatacacacacacacacacacacacacacacacacacacgtgtgaaaagtgggtattatgatactgctgtcattgagatattttaattgaggaataaatttttttcctgtgatgtttcttgggacatcaatatttgagtatataaggctttttctttaatccattaactataaattttgaagaaaatgcatgagaaaatggagaaaatgtgttttttttttaaaaaaaattgagattaaggtctcattatgttgcccaggctggactcaaactcttgggctacagtaatcctcccacctcaatctccagagtagctgagactacagttgcctgaaactgtgcctggcagagaaaaaagcttaaaaaaataagaacatggtaatgatttgataatattcagttacatttacttttgattcttgtaattcaagtaaactcaattttatgtctgatattttctcacagctacctatatatttcttcccaatttaaaatatattattttattttatgcctagcaaatatctttacagtataaatatttacgctcatgaaagtacgtagccagttatttcttagggagaattttttccctatattttgatgggcttccaaaagtattaccagtaattctcagtaattacaattaggtcagttacccaggaaaaggtaagtctgtaacattctttggactaccaattttcttttactaagtttcctgaacaataaatatttttgaaatataatgtattaatagaattctggagtacttccattatttccagtcaatgcaagttggaatgcttctactttatgctaaaaatattaatgtttctttttcacttgggttcttgttaagtgtgattctgataatgtatacaatcacatatcatttttaggtttccataatatcatgaaaatttgatttttaagcgttacatgtcaacaacctggtaaagtaatccttccattcaggatcattcaaggaatctatttaaaaatattttccccaaattatagctgaatcagaaagtttaaattattatattatatgatttgtcaaaaagagaaactcctagggagacatctccataataggtgtgttgggggaacagtaatctcaaagcagatgcactaacattataagattaaaatcattgtttatagaaacttccaattcatttaaaagctcattggggaaaaaaaagctcattgggaaaaaaaaaaaaagctcactaaagtttctattaaagcgaatacggtagatttccatccccttttgaagaacagtaggtggagctatttaagatataaaaacgaaatatcctttctgggagttcaagattgtgcagtaattggttaggactctgagcgccgctgttcaccaatcggggagagaaaagcggagatcctgctcgccttgcacgcgcctgaagcacaaagcagatagctaggaatgaaccatccctgggagtatgtggaaacaacggaggagctctgacttcccaactgtcccattctatgggcgaaggaactgctcctgacttcagtggttaagggcagaattgaaaataattctggaggaagataagaatgattcctgcgcgactgcaccgggactacaaagggcttgtcctgctgggaatcctcctggggactctgtgggagaccggatgcacccagatacgctattcagttccggaagagctggagaaaggctctagggtgggcgacatctccagggacctggggctggagccccgggagctcgcggagcgcggagtccgcatcatccccagaggtaggacgcagcttttcgccctgaatccgcgcagcggcagcttggtcacggcgggcaggatagaccgggaggagctctgtatgggggccatcaagtgtcaattaaatctagacattctgatggaggataaagtgaaaatatatggagtagaagtagaagtaagggacattaacgacaatgcgccttactttcgtgaaagtgaattagaaataaaaattagtgaaaatgcagccactgagatgcggttccctctaccccacgcctgggatccggatatcgggaagaactctctgcagagctacgagctcagcccgaacactcacttctccctcatcgtgcaaaatggagccgacggtagtaagtaccccgaattggtgctgaaacgcgccctggaccgcgaagaaaaggctgctcaccacctggtccttacggcctccgacgggggcgacccggtgcgcacaggcaccgcgcgcatccgcgtgatggttctggatgcgaacgacaacgcaccagcgtttgctcagcccgagtaccgcgcgagcgttccggagaatctggccttgggcacgcagctgcttgtagtcaacgctaccgaccctgacgaaggagtcaatgcggaagtgaggtattccttccggtatgtggacgacaaggcggcccaagttttcaaactagattgtaattcagggacaatatcaacaataggggagttggaccacgaggagtcaggattctaccagatggaagtgcaagcaatggataatgcaggatattctgcgcgagccaaagtcctgatcactgttctggacgtgaacgacaatgccccagaagtggtcctcacctctctcgccagctcggttcccgaaaactctcccagagggacattaattgcccttttaaatgtaaatgaccaagattctgaggaaaacggacaggtgatctgtttcatccaaggaaatctgccctttaaattagaaaaatcttacggaaattactatagtttagtcacagacatagtcttggatagggaacaggttcctagctacaacatcacagtgaccgccactgaccggggaaccccgcccctatccacggaaactcatatctcgctgaacgtggcagacaccaacgacaacccgccggtcttccctcaggcctcctattccgcttatatcccagagaacaatcccagaggagtttccctcgtctctgtgaccgcccacgaccccgactgtgaagagaacgcccagatcacttattccctggctgagaacaccatccaaggggcaagcctatcgtcctacgtgtccatcaactccgacactggggtactgtatgcgctgagctccttcgactacgagcagttccgagacttgcaagtgaaagtgatggcgcgggacaacgggcacccgcccctcagcagcaacgtgtcgttgagcctgttcgtgctggaccagaacgacaatgcgcccgagatcctgtaccccgccctccccacggacggttccactggcgtggagctggctccccgctccgcagagcccggctacctggtgaccaaggtggtggcggtggacagagactccggccagaacgcctggctgtcctaccgtctgctcaaggccagcgagccgggactcttctcggtgggtctgcacacgggcgaggtgcgcacggcgcgagccctgctggacagagacgcgctcaagcagagcctcgtagtggccgtccaggaccacggccagccccctctctccgccactgtcacgctcaccgtggccgtggccgacagcatcccccaagtcctggcggacctcggcagcctcgagtctccagctaactctgaaacctcagacctcactctgtacctggtggtagcggtggccgcggtctcctgcgtcttcctggccttcgtcatcttgctgctggcgctcaggctgcggcgctggcacaagtcacgcctgctgcaggcttcaggaggcggcttgacaggagcgccggcgtcgcactttgtgggcgtggacggggtgcaggctttcctgcagacctattcccacgaggtttccctcaccacggactcgcggaagagtcacctgatcttcccccagcccaactatgcagacatgctcgtcagccaggagagctttgaaaaaagcgagccccttttgctgtcaggtgattcggtattttctaaagacagtcatgggttaattgaggtgagtttatatcaaatcttctttcttttttttttttaattgctctgtctcccaagctggaatgcagcggtacgatcatagctcactgcagcctcaaactcctaggctcaagcaattatcccacctttgcctccggtgtaacagggactacaggtgcaagccacctactgtctgcctatctatctatctatctatctatctatctatctatctatctatctattactttcttgtacagacaggagtctcactatgttgagcaggctgatctgaaacttgggctcaggctagcctcctgcttctccctcccaaactgctgggattacaggcgtgaaccacagtgccccgcccttatcagatattcttttctggctgggcgcggtggctcacgcctgtaatcccagtactttgggaggccgaggcgggtggatcacctgaggttgggagtttgagaccagcctgaccaacatggagaaaccccgtctatactaaaaaaatacaaaattagccgggcgtggtggtgcatgtctgtaatcccagctacttgggaggctgagtcaggagaattgctttaacctgggaggtggaggttgcaatgagctgagattgtgccattgcactccagcctgggcaacaagagtgaaactctatctcaaaaaaaaaaaaaaaaaactttatcctctagtttcatccattgatgacacttgctttaatcacttattacaatcacctccaaatgaagattttataattccattgtttcttctacagttgttaattggctttctaccttgaagaagagttttatattctctatatatgtttgtttctatgattctggaagcatggttttctattttattcaatggcctgtaatctgttaatatcaattatttattttgatgctgaaattgtcccaggattggcctttgggactccctttaggctgatttctatgtcctttctgttacagcaagcttgggattatatccaagatttgtaattccaatgtacttacttctgtcagtgtaaacaaagtacgatttctggactagatgacttgggcattgtgggggaggtggaaattagaggtattctctgtttttcctgtaggatcttgcatttcttcctcttgctgcttgtctctttgtgtcgggaacaggccccccaaaatctggccataaactggccccaaaactggccataaacaaaatctctgcagcactgtgacatgttcatgatggccgtaatgcccatgctggaaggtagtgggtttaccggaatgagggcaaggaacacctggcccgcccagggcagaaaactgcttaaaggtgttcttaaaccacaaacaatagcatgagtgatctgtgccttaaggacatgcccctgctgcagataactacctcaatccatccctttatttccgcccatctcttcgtttcccataagggatacttttagttaatctaatatctatagaaatgatgctaatgactggcttgctgttaataaatatgtgggtaaatctctgttcagggctctcagctctgaaggctatgagacccctgattccccacttcacacttctaaaaaaaaaaaaatttttttttctgagcttggagaaatatatcccttagtacacttggcatttataaagcagacatcaataaatttatatatatgtgacagataccaacaacaatccagtccccttccctcataccttatttatgtacatatattttatataatagatataatttattaacaatttataaaattactttgttaatactctatatcattttctagctgaatttatcaatgataatgctcttttcccacttttatttttttcccattgaccatgcagcagttttgtgtagaccgtctgataacaactgatctgtttatctaggggggagaaatctaattcaatggaaaatataaataaaattgtgataaacttttgtaaatagagtggcttttaactacacttgagatggctagcaaattcataaagtgaatttactttctttcaaagttcagtaattctttctggccattagggatatgtccatttatactttctcagtatcccaagtcatttcatggttttaaatcattcatgaacttccaaatatagtgaatttatttcttctgcatttaaaattttatcacttaaatatacaatataccgtattgccatgacgaaaaatggtaaagactatttttcacttctgttatgcatttcattaatacgatatctgtatgtgtttccaagttagacatttcttttgcccatttcctacactaatgatactaatgatgactttgtggaatattcagaattaacaaaatgtgttttgagtgctttttttagtactggggcaaatttgcagtaatatcgcctgctttttacattaaattccccataacttttacaactatgggaaaatttctgaaacgtgcacagattccaagtgttttctgagaactttatgcttattgtagagtggttacagacactgaatgctaaagtgtattactctttgaaaagcattgcttgatttcttttggtgaattctgtaaaggtgcagggaaacataacgtcccaattattttttctttcttctttgtttgctgcctatctactttgaaagatacaatagttaaaacccagaaaagagattggaaaccccttagagaatgaaagacatccaagggctctaaaatgcggcagttgctgcttctgagaccaaaaaagggggcaaaatatagagtgtgtggttctacttgtgtgattttttgaaagaaagtatttgaatttatctaaaaatactaaatttgtatttacattagttttcaaatagaatttaataagtacagtgttctataggtaatattgagagaaatagaggacaatgaaacctctctcctccatcatcttgtatgaactaccaaaatgtttatcatatggacagttctcatatatagtcaaatagaaagaaagacataataggaaaacaaatgacttgggaaactaagctaacatggtctaattattctgacctctgctcacctaacttgatttaggaacaaatcattgagagttagagcatgaatagtcaagactgttagaccatatctcaaatatcagtgacttcaatcaactatgtttccagtttaagctgaataggctttattaaatagttgttgaatgaatggataaacaaataatgtactctggggattacctgataccaggattctgaattttcagatgtatcatagaaggatagcagctttgcaattaggtaaattgttaactgtgtcacctttagcaagttatttaatctctttgagcttcagcaaagtaggaataatcatatctaatttgaaaggtcgtggtgatggctagggctaacaaaaatctgattcacaacatgcaattaattaacagtagccatttttagtggttgaccaaaaaaaggatttatattttcaatgccagcacactcgatgttctgttgggaaaaataataatgatttttgtgtgcttctccatatggtataatggaatgatttgtggatggaaataaaactgttctaaaatttttgtgacagctggtttaaaaatcttaagtgcctaggcacattcttgattgagaagccacagttttaggccataaaagatgggggaaagatttttatatgagacaattttgtgagtgttactttttctttgtctgaaccatagtgaaatctaaacaaggatcttgtgaaacttattttaaagaagcagtttacttcaatgggatcttagataatttcaccagaaaatggatcaccgaaaccagaaggctggtgatcattatttggtttgggccatataagaattgaaactaacggcttagctttaggatttttaggacacttgttgataatttaggattcataattaacatatgtgttgattgttttctgagactaactgggcaatgggtttggatgtgtttacatttattctgattccagtcataaaattatgtcaaggactttccttgtctttttatgtgtatgacagatgtgtatgtatccatttcatctaacaagttaaagcgttcagctataatttaaaatttgtagcttcactgttttatagtacctaaaattggaatgtaatcagtcagaagacattcatccactgctttcattccagaagtattatgctttttgaagcagcaatagcataggaatgttgaggagactatactatacttttatagcatatttaatctcgtagatcacttttcaatgaattataaggctgatgacaaatgagcaaattgtatcagttttctttatgacatgtaacagagtatagctgtgatcatgaattggatagttctggtgtaaaaatctgctttatccccatataagatgtcaggttcagaaaagcaaacacatagtttcgaagagatgttgatcaaactgatgaggctaaatctcaagaaagagacacagttaccctctaatgttacactttgagttcacctttttttttttttttgagacagagtctcaatctgtcgccaagctggagtgcagtggcactatcttggctcactgcaacctctgcctcctgggttcatgctattctcctgccttagcctcccgagtagctgggactacaggcacacgccaccacacccagctaatttttgtatttttagtagagatggggtttcaccatattggccagaatggtcttgatctcttgatcttgggatgcacccaccccacctcagcctcccaaatagctgagattacaggtgtgagccaccatgcccgaccactttgagttcacttttaagaaaccatacttaatggaaaattaccagtaacagggcatactgtttaggatgcattcctaaaatattaatggcaaaagatagccagcctatggcaaagctaattggaaaaaatattttataaaggatgagacttctggataccatatgggaagggctctggttcaggaaaatgtttttaaaaaactgtcattgaagagaccatagaatcaaacaaaataatttaatctgtatgtaaaagaagttggtaccaccataatttttcttatacatgtcatataaggatctactctgtgtattgtcattgagggcagatataatttcttagttcatcattaactctctgaagtatttcacacagtagtttgtacaccttctaagtactcaatacaatgcttgagttcaattattggaaagtggtctcttggagaaaaaagaatcatagtgcaaaaccaattattttacatggacttttcctctatatctaagccctaataagaggcagctgtctgatatacatacatacatacatacatatatatatatatatatatatatatatatatatatatatatatacacacacacacacacatatatgtatatatatatttggagtaggggatggagtcttgctctgtcacccaggctggagtgcaagtggtgtgatctcagctcactgcaacctctgcctcctgggttcaagcgattctcctgcctcagcctctccagtagctgggattacaggcgcctgtcaccatgcccagctaattttttaaaatatttttagtagagacagagtttcatcaagttggccaggctgctcttgaactcctgacctcaggtgatccacctgccttggcctcccaaagtgctgggattataggcatgagccaccgcaccctgccaactgtctgacttatcttaaaaggctaaggacctggtttgtttgtcaaattttgaaaatagatgcctcagttcataagatttccatattgtgtggcaggcgcctgtaatcccagctactcaggaggctgaggcaagagaatcacttgaacccgggagacagaggttgcagtgagctgagatcacgccactgcactccagcctgggcgacatagtgagactctgacaaaaaaaaaaaaaaatccatatgtgaaaattcttagaagcttcctatacaatttcagctgaagattcagccaacagttcattctgagactgtgttccatggaaaaagtaaagcccaggcatggaagtgggaatggaaagaaagattctaagcctacaaatactcaaacatcaagaagaaataaaaataagtcatcacttcgacttcatgtgctaacatcactgaggttataaattcccaggaatattttattgcgggagcaagactgcactgctgcctttcagcttgcaaattccagtgagaaacgtctttctctctgctctcaactaactctacagaacgctgtcctctcatttcttcaggctgcagttctagagtagggactcagagtgccactgttggccagtctggaaacagagataaatgagccaatccccagacattccggcttggtggcttttctaatttcatggaatgcaaatccaagagcagacccacaacattcctattatggctcctagttctacaaattataagcaggaacggaacggatttacaggcaatgagttcagctccttcttggctggagattctataatccaagaagagtttgaaaaggggcttatttgggctggagcagcagcaactctaactgtggaaaaggtggggaatggtgctggactgacagtctgggtagaaccaaggcgactactgcctcctttcctgctatttctatcctgctgggcattctctatgatgcagatccgttattcagtcctagaggagctggccaagagtttggtggtgggaaaccttgccaaggatctgggactcagtgtcgaggacatgcccacttgaaagcttcgggttaatgctgaggaataatacttcattctaagtggggaaagtggagacttacttgtgaatgactgaatggatcaggagcagatacgccccccaattatagcttgggccataacgctttgaaatagttgaaggccaggcatggtggctcacacctgtaatcccagcactttgggaggccgaggcgagcagattacgaggtcaggagttcgagaccagcctgaccaacatagtgaaaccctgtctctactaaaaatacaaaaattactgggcatggtggtgcaggcctataatcctagctactcggggggccgaggcaggagaatcgcttgaacccgagaggcaatcgcaccactgcactccagcctgggtgacagagcaaggcgccatctcaaaaaaaatgaacaaacggtagttgaaaattctttaaatgtttttcacattaatatggagattcaggatatgaagaatcatgcaccacggttcagcaggaatgttattaagttacgtatctctgagtttacccagctggaacaagatttgcaacagaacctgcagaagatcctgatgttgagagaaattccttacaaaattatcaccttagcagcaactctatatttctctttgaagtaaaagtgaccaacagtggaaagacatatgttgatcctgtgttagagaagctgcttgactaggaaaagcagagctcccatcccttagtgctagcagccttagacggccccccaacaaagcagcatcactcaactcctgatcctattggttgaagccaatgacaaccctgtgttcatctaggatgtgtacagcgtcggccttcaggaagatgtgcatccgggcactcctgtgctgagagtgagggccaccaaccaggactagagtgtcaaggcagagatcacatatggcttcacaacccagagtacccatatctagtttggccttgatcaaatagtggagaaatgaaaactttaagtacattggacttttaaagatttttaatttccatggttttggtagcaagtgacagagagggactcattgtccagtgtacagttgagaccgaatttctagaagataatgacaatatcctagaggcgatttttacttctaattccacaatgattcccaaagattctgcaccttggacagtaatcactgtccaggatttaaatcacaagatctttaaatcacaagatctggattcgggagaaaacgaggtcacatgtctgatataagaaaatgcaccttgagaaaaatcttcctccaataattaactacatgcttgtaacaaatggggccgtggaccaggaacagacccaaggtataacatcagcatcactgccactgacagaggcaaaccaaccctctcgtccagcccaagcatcaccctactcattggcgatgccaacgacaatgctctggttttctaccaggcctcctacgtcgtccacgtggccaagaacaatcttcccaaagcctccatagtgtgcaagtagacacctccaacctagacttgggacccaacagccaagttccctattccatcgtggccagtgacctggagccacaggcgctgtgattctaggtgtccttgagcgcacagtgcgccttcgaccaagagcagccgcgagccttcaagctcacgctgcaggcccgcgaccaggactagctcgcgctcggcgtcaacgtgagcctgcgcgtgttggtggacgacctgaatgacaacgcaccgcgggtgctgtaccccagctctggagcgcaatggcttcgcgctcttggatatggtgctgcacgccgcggagcctggctacctggtcaccaaggtggtggctgtagacgcagatgtgagacacaatgcgtggctgtcctaccacgtgctgcaggccagcaagcccaggctcttcagcctggaatgcgcaccgacgaggtgctgacagctcgcacgatgggccacaggaaagcgactcgccagcgcctactggtcgcggtgcactgcggtggacagccgctcctctcgctaccgccacgtcaccaccactaccgcccctcgtcgccgacagcctgcaggagactctgccagacctcagcgatcactctgcaaagctacagcctgaatccaaaattaatttatatctggtgattgccttagctttaatttcctttttattcttcctgattgcattgtttgtgctggttttaaagtgccgaagaccccaaaatgatcctgtctgagtctttcccacggatgtctatcccgcgctaagccccaggtttctgggtaactgtagctctatgatgccatattcctaccaggtgtgtgcttctcctacgaatccagggctgagtgaacttcttttttgaatccctacccctcaggactcaatagcagtttcactgcagaaagccccttggggaaggggatgattgtgattattctaattgcttgggcagaatccactctccaaggtgaaaaattcttgatgaaactaagttcagtcacaagcaggttttcttctagcattaaatattttcagagatctcagtaaaaagcatttctagcagcaagaccaaaggcctaagatgagaaatatttggcatggtgagcttgagggacagtagtcaggcagacaagagtatcagacatgccagagcatttggggcctgtaggtaaggagcatgttttgattatatatatttgtatgtgtttgattatattttataattttactttgatattcaaattgtactgatccaaaaataagggagggacaaatcttggccattgtagtatgagagatgtaaatttacaactcagaatccctgcttatcacttctccttcagcacacaactgtttcattttctatttaagaaacttcctctcactgcaaaaagacattctggctgataaagttagcctataatttcagtaaatctaagaatatgactaatggaagttgccagacctaaactttgaaaattattgttccactgaagagcgtcttatgactgagtgttccagtctccttctcaagctgaaccttgcttttcaaaccagattaagaacactatcataagttatactgcattttatttccctacccatgtccactgcatcattctctatagtacaaagagcttgtctcgccaggcgcatctataatcttagcactttggggcgccaaggcgggtggatcacttgagcccaggagtttgagaccagcctggacagcatggcaaaaacccatctctacaaaaaaaaaaaacaaaaattaacaaggtttagtggtccatgcctgtggtctcagctacttgggaggctgaggtgtgaggatcacctgagtctggggagattgaagctgcagtgagctgtggttgcgctcctgtactccagtctgggtgacagaattagaccctgtcccaaaacaaacaaacaaataaagagcttctctccttatgacttatttaaagcttgggaaattgttccaattcaaatgctttaaatggacttgagctaaaacagaatgtggtatatgaaatgttcttataatcaggtgattgtaaaaattgatccagataatgttagcatagcattttactgaactagtagtttacaaacacttcaaaaattatagaataacatttgcatataaaattcctcatacatttccctatcagtgaattggaagcttacaatatacaatattaccaaaaagacaaaaaaaatgaaaaggaaacagttacctttggaaaacataattaggtaaaatgggtaatatggaaagtctgaaaactgaaaaaattactgataagtcaagagaaaaggaatattagtaggaaaattcataaaagtgtgtctgactactcacagcaggtttccttattggtatgtattctgtggtccatctaagctatgttaattttattttaaatgctacctgggtattggcttctaaaaggaattcagtaaatcagataatttggcatcttcaatctagattctgatgctcacctgaaaagtctgctaaggattggaaaccaagaaaagtgaagtatctcaacagatatgtgtcacttgtgtgtactggattttttttttttttttttttttttttttttttttttgagatggagtttcactcttgttgcccaggctggagtgcaatggcatgctctcggctcactgcaacctccgcctcccaggttcaagtgattctcctgcctcagcctccctagtagctaggattacaggcatgtgccaccacgcccagctaattttgtatttttagtagagacggggtttctccatgttggtcaggctagtcttgaactcccaacctcaggtgatcttccctccttggcctcccaaagtgctgggattacaggcatgagtcactgcgcccggtcgcgtactggatttatattgtgtaatactttgctctagcagtatagtaggtgagacagtgactgtgtctagtgagcaaaaggcacttatttgacacttttgactcttcctttctacttaccttatttaaaattgatttttgcatgtggcatgatgcaccagttcattgaggtaggggttgaagttatttcccatttttttcaataccatttattaaaaatattttcctctttctgttgaatttgcttggtgcctttgttgaaagtcatttcactgatatatgtagttctatttctatattcttgatcatgtttcatttgtctattcttttactaatagcacactgtctcaattattgtagctttatagtaagtcttgctacaaagtcttactacaggacaaagcttgtaggatttttgaatgggatggcattgcatctatacctttatcagggaaagagggaaggagggaggaggatcatcttaacaatattgacacttcaaatccatgaacatggtatatatttccatttaattaggtctttaatttctctcagctatgttgtatagttttcagtgtagagaggtcatgtatatttctcattaaattgtccctacatatttgatgttttctaatgttattgtaaatagtatttttaaaattgtatcttctaattgttcatttctagtttacagaaaaatgaaaaactatgtttttatgtattctatatgcttttgaaaagtaagaggtgcaaagtgctctattcttacactatattgtgtgagaatataagtcgaaaccactctgcataagttcaggcttccattctcttcagtttgtaggttgagagaacccatccagaaacagtaaacattggtgtctgcccaagtctggtcctgggtggttcattcattcatttacataacaaatatttattaactgtctgctatatgcaaggcactgacctatggactaaggatgcagcaatgaacaaggcatatatgattcctgagttaatgggccctattctaatacatgatattttacaggtctgataaaagccaacaaggagaaatacaaaagcactaagagaaagcttatagtagggaagcttcgcctaatctgaaggtcaaggaaggctttctttttttcggaaagtgatatttagagagatgaatagattaataggatgagtagaagttatctaggtaacaaggaaagtaaaaaagaaattgtcaggcagaggaaatagcatgtgtaaagatctttttaaaaaataaaaggtgtgactcaagcaatttaaaagggctagggaggctagaaacagaaaataaatagatgaaactaataaggcagggagagccttgtaaatcacacttaaaattctggattttgttctaaatacccttgtacttaggagctattaaaatattttaaacaaggcagtgacaagatatttgaattattaagcttactctggctgctatatggagaattgatttatgagggttataaatagaaataggaagataagataggagactatggcaatattcctggtaagaaatggaagaagagctggcttggattaaaggggaggcagtggatgtagaaataaatggatgaattatagatatatttaggaaatgggttcaataagacttaataatggaataggtggaatataaatttcatgagggcagggggtgttttgtttattattatattcctaggtgtctgaaaatattgttgtgttgcctggcaagtggtagatcttcagtgaaatattattaactgaataaatacaatggataaatggggagcagggattaagagtgattcctgggtttccacattaaggaactggatggacaaagctaccatttgatgagaatggaagactaaagaatgatagatttaagagaaatcgagttgagttccagccatgttcatttgaaggatctgagaaacagtgcagatattcagtgtgtgattagacatatggtcatcattcttttttttttttgagatggagtctcgctctgtcacccaggctggagtgcagtggccctatctctgctcactgcaatctctgcctcccaggttcaagtgattcttctgcctcagcctcctgagtagctgggactacaggcgtgcaccaccacgcctggctaatttttgtatttttagtacaagacagcatttcaccatattggccaggctggtctcgaactctgatctgcccgcctcggcctcccaaagtgtggggattacaggcgtgagccaccgcgcccagccggttaccattcttttactctgagttcttccattgtgatcatctagtcagatgggtagatccttataaggctgagcataataagcttcctgatagctctacactggtatgttttggggttcatggctgagctacttttgtgttttatttatcttcctgatctctttttcactgtaagaaacatccagcacccagggaaatttgctgtctaattcatactccactcttcagactagtcctagtgttcagttttgttttgttttttttctgtgtctggaattctattaaaatgtgtcaggctgttttaatttttgttgtttaattttctttcacatgattatatgtgctccatggatttttttgtttgtttgttttttgtttttgtttttgtttaagcggggtcttgctcttgtcgcgcaggctggagtgcaatggcttgatctcggctcactgcaacctccgcctcccgggttcaagtgattcttctgtctcagcctcccaagtagctgggactacaggcacatgccaccacacccggctaatttttgtatttttagtagagacgggtttcatcatattggtcaggctggtctcaaactcctgaccctggtgatctgcccacctcggcctcccaaagtgctgggattacaggcgtgagccaccgcacccggaggaaatttttaacctcagtttttcttcaccatctgtaaaactgcatagaaggaatgtttaggataaaagatgcataacaatcataacaaaattgttgggttttaatgttatgagtacacttggaggattctatgtccacacataccttaaacatcctatagagtccttagcattttaaagttgaaaccaacagtatgaatgatggtagaattttcccccccaggaagttagaactgttccatatcttgatagagggatgggttataaggatgtacacattttccaaaactcattgaacttaagagtcttgcatgtgactgtatataaattatactttaattgaaaataaatttaagaaaataaaattggctgggcgtggtggctcacgcctgtaatcccagtgctttgggaggccgaggtgggtgaatcatctgaggtcaggagttcgagaccagcctggccaacatggtgaaactctgtctccactaaaaatacaaaaattagctgggcatggtggcggacacctataatcccagctactcgggaggctgaggcatgagaatcgcttgaacccaggaggtggaggttgcagtgagccaagatcatgccattgctctccagcctgggcaacatgaacgaaatgccatcttaaaaaaaaaaaattaaaagaaaagaaaattagcctcccccaccctcactatacctcagactcacccctgaaagatcactactattcatccctggttatgtacacttacaaacattttctgtgtgtatgcgaatgtatgtgtggggttttctttgcacaacaggatcattttacagtatatatactgttgtgcaacttgctctttccacttaatatctcaaggaatcttttctttgaatctttatagccatgtacctcaatcttagtagttttctttattttatttttgaataggaaatacatttacatggttttaaaaatcaaaacaatatactatgtatatattgagaagtctgacttccatccctatcctactcctattccacccttgcttcctcctgtcccctgtaggtaaacattttataactttattaagcatcctgtcagcatttcttatgcaaatatgtacatatatttttatttccccattttttttacaaaaagataaaatactatacaccactttatatcttcctttcttcacattatatcctttaaaaatatttccatattggccgggcgcggtggctcacgcctgtaatcgcagcactttgggaggccgaggcgggaggatcacgaggtcaggagatcgagaccatcctggctaacacggtgaaaccccgtctgtactaaaaatacaaaaaaaaaaattagccaggcgtgatggcgggcgcctgtagtcccagctactctggaggctgaggcaggagaatggcgtgaacctgggaggcggagcttgcagtgagccgagatcgtgccactgcactccagcctgggcgacagagcaagactgcaactcaaaaaaacaaacaaacaaacaaaaaagaacttccatattaatatatagaaagctgttttttttaacagttgcttagcattcctttggattattaaccagtctcataaatgagcgctattgaatagccctgtacctacatcagtttttacatatgcagtatatctttgggatgaattcccagaaatggaattgaaattgctgggtcaaagaggaaataggtgtaattttcttaggtattttcacaagaagtgttaattctaactttctgttttgaaatgatttcaaattttcaaaggagttgcaagaattgtacaaagaactgtatctccttcacccggatgcaccgggtgaattatatgtattatataattgtatctgtaggccaggtgcagtggctcactcctgtaatcccagcactttgggaggctgaggcaggtggattacttgaggccaggagttcaagaccagcctggccaacatgataaaactccatctctactaaaaatacaaaaattagccaggcctggtaccccatgcctaagggtgaggcatgagaaatgcttgaacctgggaggcggaggttgcagtgagccgagatcgcaccactgcactccagcctgggcgacagagcaagactctgtctcaaaaaaaaaaaaaaaaaaagtaaaaaagttttttaaaaagatgtatctatatatacatatttacatacacacccaagtgtgtatgtatatatgtttgtgtgtatgtacacaaacacattatttttatatgatatgatttttttatgacatgattatttttatgacatttgagagtaagttgtagaaattatgtttctttattcctaaatacctcattgtgtatttcctaacaaggacattcttttatataattaaattttaataataaaaatcagaaaatttaacatcaatgcaatataattatttagcctatagtccatatttaaattctaccataccttatagtatattttactatacctcatagtaattttttttagtccaaaatatcacacattgcatttagttgccatgtctcttttttttttttttttttgagacagggtctcactctttcgcccaggctggaatgcagtggtatgatcttggctcactgcaacctccgcctcccaggttcaaatgattctcctgccttagcctcctgagtagctgggactacaggcatgtgccaccacactcccaccacacccagctaatttttgtatttttagtagagacaaggtttcactatgttggccaggctagtcttgaactcctgacctcaagtgatctgcccacctcagctaagtgctgggattacaggcgtgagccaccatgtgtggcctagttgccatgtctctttaatctactttaatctgaaacagttcctcagccttgtttgtttatatgaaactgacatttgtaaagactagaagccatttgtcttgtataatgcctttaatttatatttgttttatgtttcctcgtgattttatatatagagtttgtttgtttgtttgtctgtttgtttgttttgagatggagtctcattcttgtcacccaggctggaatgcagtggcgcagtctcggctcactgcaacttctgcctcccaggttcaagcaattctcctgcctcagcctcctgagtagctgggattacagatgcctgccaccatgcctggctaatttttgtacttttagtagaaacggggttttgccatgttgcccaggatggtctccaactcctgacctcaggtgatccgcccgccttggcctcccaaagtgccgggattacaggcatgagccaccgtgcccggacctcatgattgtatttatttatttatttaatattattattattatttttttttttttgagatggggtcttgctctgtcacccaggctggtgtgcagtggtgcgatatcggctcactgcaaccgctgcctcccagattcaagcaattctcctacctcagcctcccaagtagctgggattacaggcatgtgccaccacacccggctaatttttttgtattttttttagtagagacgaggtttcaccatattggccaggctggtctcgaactcctgaccttgtgatccacccaccttgacctcccaaagtgttgggattacaggcgtgagccaccacacccagccttatgattgtatttagactagacatttttttggtagtatattatttagccattgctgtgtaacaaattatcccaaaacttagtggcttaaaagaagcatttattatctcataaattttgtggatcaggactgggtatagctttgctgagtgcctctgcctcaaagtcttacaaggcagcaattaaagtgtcacctaaggctattgtcttatctgaagggtcaacagaggatggatccgcttctaatctctctcacatagttaatggcaaaattaagttccttgtggattgttagactaagggttccagttccttgctggttgttagcttgaggtctacctcagttccttgccatgtggacctccatagggcaaccagcttctgttagagcaagtaaaggagagtgccagagagggcaaatgtgatgaaagccacaatctttttataaacctaattttgaaagtgacatacaaggctaggcatggtggctcaaacctgtaattccagcactctgagaggccaaggagggtggactgcttgagcccaggagttcaagaccagcctgggtaacatgacaaaaccctgcctctactaaaaatacaaaaattagctggtctggtggtgcatgcctatagtcccagctactcaggaggctgaggccagagaattgcttgaacccaggaggcggaggttacagtgagccgagatcacaccactccactccagcctaggccacagaatgaaaccctgtcaagaaagaaaggaaggaacaagggagggagggaggaaggaagggaggtagggaggcagggaaagaccgagaaagtgacataccatcatttttgctgtagtttgttcattagaagcaaaatcacttggtccagcccacactctggggagatgattttctaactccatttgtaataacttattctacttttattagttggcattatacagtaagaaagagctttcttttctcttcttatttattcatatatggctcatgtgttttttccaatgagttatattctattactaacattttttattttgacctcaaattgttttagatgttaccaataagaacctcttcaagctggttcttgtgtccttttgccataactctctcattttcttgaaccctttcttactttctgatataagaaaatattagagactcatactttccttgttccagttctgagatgaaccatttatccaaaagccttgcttcattttagtagggaatagtatttagaaactaagatctgggtgtgaggtatgctcactgctaatgggctgtcactgtttctaggccttgtcagcagacggagctaggaaaaacacacataaacacacccatatttatatttgtacacacactccctcaaaatcgtgagttcatattgatacctccagttctggttcttcctagccttccccctttccatctttgtatttttattttccaacagtaagaaccctggctcccagtgctatgaatatatttactcatttgctccatccactgcactccagcctaggccacagaatgaaaccctgtcaagaaagaaaggaaggaatgagggagggagggagagaggaagagagagaaggaagaaggaagggagggagggaaaactgagaaagtaacataccatcatttttgctgtagtttgttcataagaagcaaaatcacttggtccagcccacactctggggagatgattttctaactccatttgtaataatttattccacttttattagttggcattatacagtaagaaagagctgctgaagatttgcttgcaattggttgtctttaaactgagggtatattgtcaaagtactgtgctgaaaagttacctgtagtatagttatgtgattcattaaaataaagtttgtttctattatgtgcagttttagagttttgccacactctggttgattagtatattttctgttgcttttttgttttgttttgttttgttttgtttttgagatagggtctcgctatgtcacccaggctggagtccagtggtacaatcacagctcactgcagcctcaacctcgtgcacttaagcgatcctcccacctcagcctcccaaatagctggggctgcaagtgcacaccaccatgactggctaattttttaattatttatttatttatttatttattttagagatggggtctcactatgtttccccaggctgaccctgaactcctggggtcaagtgatcctcctgccttagcctccaagtgctggtattacaggcataagccaccacacctagcctagtattcttttttgaatatgtaaaacattaacataaagtcaaaactattaaaaaaaggtgtactcagaaaattgtcattcctcccctataccttctgcctcattcacaccacactctgtagataatcgatttcattagtttgtggtttatcctcactgtgtttctttttgcaaaacgcaaaaacaaaacctatacatatttatattttcttatgtcctcttctttcttacacaaaaggtaacacactatgtaggtagtcctggctttgaacagtttcactataaaaatatttgttactacagcttaaataacataagtctcctaaaaataattcaaattttagttaccatggtatattaactttgagtagttccataaaggacaaacttggctgctagcccttcagtccacagagcactttgaaaataacagatgagcaaaataatgtggccaatcacatgacttctttcaaagtatgtcagtgatcagtcactgtgtgcctataatttagttcatgcacagacagcaaagcatgtagttgtgttgccttccagtgataaacccacataacattttagaaaaatgtattaagaattggccagcaaagataaaagtgcagcaaagaaacaaaagtgataatgttttcagtgaaatttgaattgaacataaatggagttatagaagaaatagctgaccatgggaatgttcacactgctactttcaagaatctctagaagggcagctaaaggagcttagtgaaggtgaatttattgacatgaatgagaaaagtaattgtgatgaaaaggatgaagatgtcccagagaaagtaatgccagcaaaaacttcacattaaaggaactctcagatatttcaaagcattgaaacctccaagaataaataaaatgttggaagttgatccaaacttagaaaggagtatggcaacttgtcaagatgaagaaaaggtgcttattcctttttatttatttatttagagacagagtttcactcttgttgcccaggctggagtgcaatggcatgatctcagctcaccgcaacctccacctcctggattcaggcagttctcctgcctcagcctcccaagtagctgagattacaggcatgtgccaccacgcccggctaattttgtatttttagtagagacagggtttctccatgttggtcaggctggtctcgaacccccaacctcaggtgatctgcccacctcggcctcccaaaacactgggattacaggcatgagccaccatgctccacctgcttattccatattatatgttataggatgaaaagaggccaaactaatcttgacatgttttttacaaggaaataatcctccatggttctaatttttttttttttttttttttttttttttgagacagagtcgcgctctgtcacccaggctggagtgcagtggcacgatcttggctcactgctagcaccgcctcccgggttcacgccattctcctgcctcagcctcccgagtagctgggactacaggcgccggccaccacgcctggctaattttttaaaaaatatttttagtagagacggggtttcaccgtgttagccaggatggtctcgatctcctgacctcgtgatccgcccgcctcggcctcccaaagtgctgggattacaggcttgagccactgcgcccggtgggtctaatgttttaaattacactgtgttaaataaatattagtttgttggttttttttttagtttttttatttctctacaaatttacaaccaataagagtttttaatgctttgacaaaaaatgttaaaggtcatagtacaatcgcatttcttcccattgattattaacatcactttacatagtttcatcttgcattagcaattttgtgtgtgtgtttgtggttttaaggagcggagagtttaataggcaagaaggaagggagaagacagaaggaaggagctcccccttacagagacagagggagcggggctccaaaagaggaggtccccatctaccgcggataccagccaggtatatatgcagaggctggtggaggtgatgtctgatttgcatagggctcaggggattggtttgaccaggcatatcattcacgtagcccgagaaaaagctggccctcccaccccagccttttaatatgcaaacgtagggcgccatggatgttctaaacacgtggagatatgtggggggcagccatgtggccaggaacttgtggggcaagggcaagaaggctgtgggaatcgccaagttgaatggacctagtttctaatggcctgcatttgcatatcaaaggttgctggcctggctcctagagccggggctttaaaagaaacttttccggagatgctttaaaaaatgaaaacttcccaaggaccccttttcctgtctatctgcataaaataatttcttttattatttatttatttatttatttatttatttatttatttatttatttatttattttgagacggagtctcgctctgtcgcccaggctggagtgcagtggcgcgatctcagctcactgcaagctccgcctctcgggttcatgccattctcctgcctcagcctcccgagtagctgggactacaggcgcccaccaccacgtccggctaattttttgtattttcagtagagacgggatttcaccgtgttagccaggatggtctccatctcctgacctcctgatccgcccgcctcggcctcctaaagtgctgggattacagaataatttcttaataactcctaccacattcctccctgtggcgatatcaaactaactgctgttaggaggctttgggcgaccattgcttctggctacttcctgctgaaaaggggcgtctaatggagaacagcagctagggctcctcctggggttgatctaagggtcctcggaagaatggcgtccatgtgtggttcagtttacagcaccgtttggagtttgattgcttctaggcgagaagaaacaattcaagttatagtattgagtatacagagtccaaatatcaatacaagacatataagcaagagagtgcttaataaaggggttaaccaattccataaagaagactggaagtaattaaagagggattgtagccactcggggctgaagcccacattttccctgagcctgtcaataattttgatttgatttttaagtccctgtagatttgcctcttctttactacaggtgttaatcccaaagaagcatgtttcatttaaaaatgcattactggccaggcgtggtggctcgcgcctgtaatcccagcactttgggaggctgaggcgggagcatcatgaggtcaggagtttgagaccagcctggcctacatggcaaaaccccatctctactaaaaatacaaaaaattagccatcgtggtagtgggcgcctgtaatcccagctaattgggaggctgaggcaggagaatcgcttgaacccgggaggcagaggttgcagtgagccgagatcgcaccactgcactccagcctgggcaacagagcaaaactccatctcaaaacaaaacaaacaaacaaacaaacaaaaactgcattactaaatccaataaaaagtcctagtagactcagtgatagtaaaactttcatgcttcctttttgccagtaactattatccctgctataaggatactaattaagcaaaatacgacagcaatggaaactctgtccaatatttcagttagaaggtgctaccatggataaccctattgcaaatagtagagtgaggaaagcagttcccacaaatgtggtgtggtaggtaatttccatctaaaattttacttgccaacatatagaattcccctctgtgggcctacgaagttccttggttttattttcccaaacaaagaaacctccgggttacaggtaccttacttactttcattacctggcacaatttgcaaaataattgcccagaactagcatattgattcacattttcacattacccatccctttttcccccccaccaagctgcagaagatcaccacttgattcacaggaataagcagggccagggttagtctaaaatgtaggcaaaaagcttaaaaacaattaatgagactagggtttaatgacaaatgtatgataagctttggagcaaaatttttctctccagtcctcatttttggtaaaaactaattatgaatgaactttaatcttatacttggcctgattatttgcatgaagtgcagcaagaatggttatttctacataggacttttggattggctttgatgaaacactgttccacaaggaatttcagattagacttttaaagctgagcccagacatgggtttgtatcctctaatacctgtgagttgggttatcctctcctcttgaggtcccaagataaactcagagcttccagacctgttagaaagtgacattcttcactgaccacaggttaggaaccctgtgtggggactgtgtagacaaggtgtgaggccagttctccccaaggggcttttattggctctgcatgtcaagcttgattccttaaagggaaacacaccctttcagttaaagccttggcaaaataaccggtttttccaattgtgttctgttgacaaagaaaaatggattcttgctgcactgatgcgaacaactatattgccgtaagttaagagtacttacagatagtctccaaattttagaggaaccaggcagagaaaaatgaacatgctccaaattttgttcacagtagtataccttacttgattattaaaggccataaatagtttaaaataagtttcctttcccagtccatgcaccaaaatgatacggctctgatgagtggaggaacaacagggttcctggtcctcatgctggtttagataaaatgacacagacacatgtggagtggttttaaggagtggagagtttaataagcaagaaggaagggagaagagagaaggaagacgctcccccttgcagagacggagcgggggttccaaagctgaaagaggaggtcccccacattaacaatttttaaaataccgtacaactgcagaaaatgaggactgcctgtacatactgtttgacactttgtttttttttttaacttatcaactttattttgtttgtttgttttggttttgggtttttgtttgtttgtttgttttggagacgagtctcactctgtcagccaggctggagtgcagtggcacaatcccagctcactgcaacctccacctctcgggttcaagcaattctactgcctcagcctcccgagtagctgggattacaggtattcgccaccacatccagctattggttttggtttttgagacagggtcttgctgtgtcacacaggctggagtgcagtggtgtgatctcagctcactgcaacctctgcctcccaggctcaagtgatcctcccacctcagccttccaagtagctgggactacaggcatgcacaccatgcgcagctaattttttctattttttgtggagacggggtctcactatgttgcttaggttggtcacaaattcacagcctcaagcagtcctcctgcctcaccctcccaaagtgctgggattacaggcatgagccaccacatccagccttaccagctatattgaagtataatttatataacataaaatttgccttttaaaattatacagtgcaatgcattttgacaattgtttacatctgtgtaaccaccatgcaatcaaaatatagaacatttctataaccttcaaaagttccctcatgcccctttgcaatcaattcactacttctccagctccaggcaacaactggtctgcttcctgtcactataaattagtgttgcctctttcagaatttcatctaaatggaatcctataacatatactattttgtatccatcttcttttactccaaagttcttgaaattcattcatgttcctgtgtgtatcagcagcgtgttccatttgattgttgagcagtattgcattgtgtggatatatcacaatgtgttcattcattcaactgttggtggacatttgagttgtgtccagtttagtgctattctgaattaaagtgatgtgaacaatcatgtacaagtatttttgtaggcatattttttttatttctcttggataaataccccaaaacagaattgttttgggggtcatatgaaatgggaagtatatgcttaactttataagaagctgccaaactatttttcaaaatggtaatatcactttacattttcatgagcaatgcataaagcgttccgcttgctacattttctcaccaatgcttcctattgtcaattttttaaattttagcaattctagtgggtgtgtgatactatctcattgaagtttcaactgtttttccctgttgactagagacactgagcaacttttcatgtgttgtctatttgtatatcttcttgaagcattcgttcatctttaactgagctgaacgccttcttaaaattgagctatgggagttttaaaatatatccttgtagctgggcgtgatggcaggtgcctgtaatcccagctactcaggaggctgagacaggagaatcgcttgaacccaggaggcggaggttgcagtgagccgagactgcaccactgcactccagcctgggcaacagagtgagacttcatctaaaaaataataattatacatgtaattatatatgatttttatatatgtaatatatatattcttgatgtgagctctttgtcacatacatattttgtggatattttatcccagactatgacttgtcttttcattttcttagttgtgtcttttgaagagcagaagatgtaattttgataaagcccaatttattttttcttttatagtttgtatttcttatgtcctattcaaaaactccttgcctactgaaaacttatgatgattttctcctatattttcttttagaagttttatagttttaccatttataatttggtctatgaatccttttgagttgatgtttatgtatggtgtatggtgtgaggtaacaatgaagattcatatttttttccaaaggaatatccaattgtctctttggaaaaatatgctgagaaggctatcttttccccaccaaataatcttagcaccttaatcaaaaatcatttggccatggacatatgtaggtgtgggttttttctgggctctctgtgttagatggatagatagacagatacagatatataactgtgtttacacatatgtaactgtaaacacagttatatatctatatatccaccaacagttgaatgagaataaactattgttataagcatatatacacattgtatatatatgtgtacatatacatattgcatatgtatgtatacatatatacacacaaagtatatatatgtatgtatacatatatacacacttaaagtaatggcctccagttcgatccaagttgctgcaaaggacattatttcatgccttttcgtggctgagtaatattccatggtgtatatatatatatgtgtgtgtgtatatatatgtattatgtatatatatatgtgtgtgtgtgtgtgtgtgtgtatatatatatatgtgtatatatatataccacattttctttatccactcattagtcgatggggacttaggttggtttcacatttttgcaattgtgaattgtgctgctataaacatatgtgtccaagtgtctttttcatataattacttattttcctttgggtagatacccaatagtgggattgctggattgaatggtagatctgttttttgctctttagagaatctccatactgttttccatagaggttgtactaatttatattcccagcagcaatgtgtaagtgttctcttttccccacatccacaccaacatctattgttttttgactttttaataatggccattcttgcaggaccaaggtggtagctcgttgtggttttaatttgcattttcctgatgattagcgatgttgagcattttttcatatgtttgtgggccatttgtataccttcttttgagaaatggctatttgtgtcctttgcctactttttaatgggattgtgttttatttttcttggtgatttgttagttccttgtagattctggatactagtcctttgtcagatgtgtactttgcaaagataatattttggatgttatatttccattataatttagttcaaagtattttctaatacaccttgcaatttcttctttgacccatggattattttaaagtttgttattttgtttgtttattttgagacagagtttcactttttttgcccaggctggagtgcagtggcacaatcccggctcccagattcaagcgattctcctgcctcagcctcccaagtagctgggattacaggtgcccaccaccacacccagctaatttttttttcttttttttttgagacagagttttgctcttgttgcccaggctggagtgcaatggcacgatctcggctcactgcaacctctgcctcctgggttccagcaattctcctgcctcaacctcctgagtagctgggattccaggcatatgccaccacgccaggctaattttgtatttttaatagagacggggtttcttcatgttggtcaggcgggtcttgaactcccgacctcaggtgatctgcccgccttggcctcccaaaatgctgggattacaggcatgagccactgcacccagtccaattttttgtatttttagtagagatggggtttcatcatgttggccaggctggtcttgaactcctgacctcaggtgatccgcctgcctcggcctcccaaagtgcagggattacaggtatgagccaccatgaccagcctaaagtgtattgtttagtcaccaaatatgtaagtattacccaaatatatttgtcactgatttctaatttaattgtattgtgatccaaaaatatacattgtatagtttctattcttttaaattcgttaacatttcttttatggcacagaatatggtctatcttggtgagtgttgcttacacacaactgtgtaactgaaaactgtgtattctgcttctcgtggttgttgtatcctataattgtcaactagatcaagttagtaagagtgttgttcagtgatcttttcttcttcagtgtttactgtatttgctaatcccatccagtgaagtttccatttcatatattgtatttttcacttttagaagttccatttgactctttcatttccatcctcaattatcttcatatttttctttaaatttttgagcacatttataatggaggttttaaagtccttgtctgctaattttgtcacctctgtaattcctatgatgattttcttcctggcttggggtcataatttgttgcttatttgcatgtctaataatgtttttattggacagcagacattgtaaatgttatatttttgagtgtttggattttgtctttctttaagaactattgcagtttgttttggaaggctattatgttttttgcagatcaggttgatcttttcaaggcttgtttttaagctttgttaggacaggtctgtagtaacttttgccttgggctaatttagacctaccacttaattctgacttttttgattaatctgagtgttcagcagggtctctttattatggctaaatgaaattcaaacattttccagccctatgtgaccatcaagaattcagctaatagctccctggcagttcttcgcccagctgcagaaaagtgtcagtgcactctatgtatgctcagattattatttagccaaagacttggggatccatattaatattcctggagttctttgtgtagctccattctctttagtactctatcccataaattctggctgcctcaatctcctaatctccccaaactctaatatctattcctcaactcagcaaaaccatggtgttattcttggatttcccctttcctgccccacagtctgaaagttgtctccaggcaaaaaaaatggagatcctagtttgcggatcctcatttccttctccttttttttttttttttttttttttttttgagatggagtctcgctctgtcacccaggctggagtgacgtggcgtgatctcggcttactagaaactccggctcccgggttcatgccattctcctgcctcagcctcccgagtagctgggactacaggtgcctgccaccatgcccggctaattttttgtattttgtttagtagagacggggtttcaccgtgttagccaggatggtctggatgacctcgtgatctgctcacctcggcctccaaaagtgctgggattacaggcatgagccaccgcgcccggcctgcttctcttctcttatgggttagaatcctgcactgtcttttgaacaaatgtctaaaagcttttatcacacattttgatccacttcccagttgttatagtggtatatctggtttcacatgactgaaaggaaaagttttcaccttgctttttgtactaataatatatcctggaaatcattctatataaatttatagaaatcttcatttttaaaatagcttcataaaactccattgtaaaaaccaggtgcagtggctcatgcttgtaatcccacactttgggaggccaaggcgggtggatcacctgaggtcaggagttcaaggccagcctggccaacatggtgaaactccgtctctactaaaaatacaaaaattagctgggtgtggtggtgggcgcctgtagtcccagctacttggaaggctgaggcaggagaattgcttgatttcaggaggcggagattgcagtgagctgagattgcgccactgcactccagcctgggctacagagcgagactccgtctaaaaaaaaaaaaaagcaaaaaaaaaaactccattgtatgtgcacatatcattatctgttcaacccatctatgacttgtcatttaggtagtttccatccaatatttttgcaatataaaaaatgctaatgaagaacctgagatatatatatatctatatatatagatatatatgtttgttgttgttgttgttatttttgaagtatgtacgtataataaattcctaatagtgtgattgctgcatcataaggtaaaggcatatgtagttttgttaaatatagctattccccatcttgcattcctacaaatagatgagaatgtccattgtcccatagtctcctttgcagagtatattgtcaagctttttaattgttgccaacctgatgggtaaaaagatatctccaaataattttaattaaaatttctcttattatgaatgaggttaaatagtttttcatatgtttaaaagccagtttatatctttttgtttttttagagacaggaatcttgttctgttgcccaggccaaattgcagtgatgcagtcatagctcactgtagcctcgcactcctgggctcaagcaatcctcctaccttagcctcccaagtagctaggactacagatggatgccaccatgtccagctaatttttttatttttttgtagagatgtgaggtctcactatgttgcccaggcttgtcttgaactactggcttcaagtgatcctcccacctcagcctcccaaagtgctaagattacagccatgaaccaccacaaatgaccctatatatttttttgaattgtctgttcatgtcttattttcatttttctagtagttttttttttaagtgttttagcctaaatttgtaaaaagtttaggggatatatgaagggactctaaatgtttatgaagaaatttaattaaaagataaaaataaaaatataagctttatttttcaacatgagctccatcaagttcaaggcacttttgtaagcaatgatactagccatttagttcacccctaaagaactgagagtcctgggaatttagccatgtcaatgcagtattttttatattggttactgaagaaaaaatgggtgccctttaaagttgtaagattaggaacaaaaacaagtcagaagaagccaaatcagcactgaaaggtgggcacttaatgattacccaagaaaactctcaccaaattgcccttgcttcatgagaggaatgagcgggagcattgtcgtggtcaggaaggattctggggaagttttcccaggcattttttctgctgaagctttggtaactttctcaaaacactctcataataatcagatcttatcactctttggccctccaggaagtcaaccagcaaaatgctttgaacatcccaaaaaagcgcttgccatgacatttgctcttgaccagtctgcttttgcattggtcaaatgccaccacttccacctcttgtgctttgttttcaggatcagactggtaaagtcatgtttcatctcttgttacagtttttttttttttaagaaacccttcaggatcttgatcacatttgtttaaaatttcaactgaggctgggcccagtggctcatgcctgtaatcccagcactttgggaggccgaggcgggcaaatcacgaggtcaggatttcgagtccatcctggctaacatggtgaaaccccatctctactaaaaatacaaaaaattagccgggcatggtggcaggcacctgtagtcccagctactcgggagggtgaggcaggagaacggcatgaacccaggagacggagcttgcagtgagctgatatcatgccactgcactccagcctgggcaacagagtgagactccagctcaaaaaaaaaatcaagtgaaaactctggtcttaaactgcagctgatctattttatttttattttttttcagacacagccttgctctgttacccaggctggagtgcagtggcaccatcatggctcaatgcagccttggcctcgtgagctcaagcaatcttcccacctcaggctcccaagtagctgggactacaggcacatgctaccatgcctggataatttttttgcagctaatctagatgtaatggttttggcacccatctaatggaaagtttgctcaactttaatttttcagtcagaattgtgtaagctgaaccgagatgtctatggtgttggctattgtttctgctgttaattgtaggtcttctttaattagagcacagacaagatcattttttttcctcccaaattgatgtagatggtcttttgctgtgggcttcatcttcaacattgtctcatcccttcttaaaacaagctagctacttgtaaactgccgttttctttggagcattgtctccataaacttttcacaaaacatcagtgatttcaccgttcttccactcaagcttcatcataaatttgatgtctgttcttgtttccattttagcagaattcatgttactctgataggggctcttttcaaactgttatcttattcttcttagtgcctcaaactagatcctattcagacatggtataacaagttagtatgggtttattttggtgcaagaaatattttgaaatccacacatttttttcataatatgcattttccatgaagtttttgaaaactccttgtattaggaatattagtcctttgtccagtaaacagactgcaaatattttctcacagctcatcatttaccttttggcatttttttgcaatgcaatttttttccctttgtttttgttttttgtgtaatgaatcaatgttttcttttttttttttttttagaccaagtctcactctgtcacacaggctggagtacaatggtgcaatctcagctcactgcaacctctgcctcccaggttcaagtgattctcatctctcagcctcccaagtagctgggattacaggcacatgccaccatgcctggctaatttttgtatttttagtagagatggggtttcaccatgttggccaggctggtctcgaactcttgacctcaagtgatccactcacctcggcctcccacagtgctgggattagagacgtaagccactgcccccggccaaatcaacgttttcttatattgcatttaggttttaagtcatagttagaaagcctttccccacacctaggttatagaaacattcattacttttttcttccagtgctagtacttgcatggtttttggtttccacatttagatccctgatctaattggagtttattcttttgtgtgctgagatatggatctgattatatcttttttcccaaatggctatccagttgtcccaatgccatttattaagcacttcatctttgtcccagtgatttgagatagcatctttatcatgtaccaaacttctatagtgccagaagatttttattttttttagacagggtctggctctgttgcccaggctggagtgtagtggcacaatcccagctcgctgcaacctccgcctcacatgctcaagtgcccgcacctcagcctctcaagtagctgggactacaggcacatgccaccacaccaggctgatttttatatttttttgtagaatgagatttcaccatgttgcccaggctggtctcaaactcctgagctcaagaaatccgcccacctcagcctcccaaaatgctaggattacaagcatgagccaccacacccggctgccagaaaattttaatgatcagaaaaccacaattctttcttcctctgttatatgttgaagtaaaatacttcatttagaaaactaagccgggcacagtggctcacacctgtaatcccagcactttgggaggttgaggcaggcagatcacctgaggttaggagtttgagaccagcctggccaacatggtgaaaccctgtctctgctaaaaatagaaaaatttgctgggcatggtggcgggtgcctgtaattccagctacttgggaggatgaggtaggagaattgcctgaacctgggaggcagaggttgtggtgagccgagaccacgccattgcaccccagcctgggcaacaagagcaacggtaaactccatctcaaaaaaaaaaaaaaaaaaagaaagaaaaaagaaataactcagccatacaaggctacccatttggtgagaactaataataagttagatagcaaggtaatagcaaaatgtgggtgcaaaattaaagcaagttatttctgaggagaatgtaggtctcatggaagattttcatgtggacaaatttagtaaattttttgcaggtagtttcctgacatatttaacatttgtgatatagtaaacaataagaaggtactaaaggctgggcgcggtggctcacgcctgtaatcccagcactttgggaggccgaggtgggcggatcacaaggtcaggagatcaagaccatcctggctaacacggtgaaaccccgtctctactaaaaatataaaaagttagctgggcgtggtggcgggtgcctgtagtcccagctactcgggaggctgaggcaggagaatggcgtgaacccgggaggcggaacttgcagtgagccaagatcaagccactgcactccagcctgggcaacagagcgagactccatctcaaaaataataataataataataaggtactaatatgatccagactagaagagaatagcactaaaatgggagatggggtaaacctgtggttttttttaccttaggcttttgacttccaaaattattgtttttgctgggtgcggtgggtcactcctgtaatcccagcactttgggaggccaaggtgggaggattgcttgagcctaggagtttgagaccattctaggcaacaaagcaagaacctgtctctaaaaaaatttaaaaattagccagaaatggtggcacatgtctgtagtcccagctacttgggaggctgaggcaagaggattgcttgagccttttgaagttgaggcttcagtgagccatgatcaccccactgcactccagcttgggcaacagagcaagaccccatctcaaaaaataaaacaaaatagactgggcacgatggctcacgcctgtaatcccaccactttgggaggctgaggtggatggatcatgaggtaaagagatcgagaccatcctggccaacatggtgaaaccccgtttctactaaaaatataaaacttagctgggcgtggtggtgcacacctgtagtctcagctactcgggaggctgaggcaggagaatcgcttgaacccgggaggtggaggttgcagtgagccaagattgtgccactgcactccagcctggcgacagagtgagactctgtctctaaataaataaataaataaaacaaaataagtaaaataaaataaatgtttgtagttccaaaatattttgatgacataatttcttcttgttctaataaaactacatatgcattggtcctatgacctagtaatcacactattaggaatttatcataaatacacacctcaaaaattacaaaaatacatatataccagcttatttattacagcgttatttgtaattgcaaaaacattgtagatagaatggaggtcacataaaacttattcttaagattcagaccgggtgcaatggctcacgcctgtaatctcggcactttgggaagccgaggcaggcagaccacccgaggtcaggagtttgagaccagcctggccagcatggtgaaaccccatctgtaccaaaaatacaaaaattagctggtcgtcgtggcacgcctgtaatcccagctactcgggatgctgaggcgcgagaactgtttgaaccccggaggcagagactgtagtgatctgagatcatgccactacattccagtctgagcaacagagcaagacttcgtctcaaaaaaaaagatcatagatcatcttatcaaatcaaagtatgcaaaatattcaagtaaacttcagataaatatgaaggctaaaccattcagcttcttcaccaaacccttgaatgtcccacctgtctaaatggagatacatgtttgtttgatttattggttaactgtttttattccatttttcctcaaatgatcccataatttgaccttaggaagctgttcaaatagacacattaggttgaatggaaagactactcgatgatatttaggattttaagaggattttatgtattttttccttgtgtgcaataatttaatagcatcttgaataggattttctgatattactaaccctctgggaataatattaggtaattagacagttagctaatattaaaatatgtatcaggtaatatttattgagagtttcctctgtgccaagcaggatcaacttcataggcaggcgacctgtgcggggacacagggcttcatgcttagataggcccccttgctttgaaggcccctaccctttggttagggctctgctgttaccatcttgaaattcttaataatttttattttatttttttgagtcagggtcttgctctgtcgccctggctggagtgcagtggactcactacagtcttgaattcctgggctcaagcaatcctcccacttcagccttctgagtagttaggacgacaaacacacgccaccatgctcagataagttttttgtttgtttgtttttttgtttttgtttttgttttttgtagagatgggactgtccctatgttgctcaggctggtctcaaattcctggcctcaagtgatcctcccacctcagcctcccaaagtgctgggactacaggcatgagccactgtgcctggtcaatcatttttattaacaagcccaagccctcttttttttttttttttttttgagacagggtctccctctgttgtccaggctagagtgcagtggtgcgatcttaccttcactgcaacctctgcctcctgggttcaagtgattctcctggctcagcctccctagtagctggaattacaggcacccacccccatgcctggcaatttttttgtatttttagtagagatggggtttcaccatgttggcaaggctggtctcaaactcctgacctcaagtgatccacccaactcggcctcccaaagtgctgggattacaggtatgatccactgcgcccggcctccaagccccctatttttattttgcactgaccctacaagttacgtagctaggcttagttatgtttttagcaaggaaagtgtataatctcatgtaccttttgaaagattactcaggtctctgcatgtgaaatggaatttagggaatgcaagagagggagtaaaaataacagcgaggaagctatgatagcatttaaggttgctttgactcaggggtagcagtagatagggtaagtaattgatagtttcaaaatatattttgggagtagtaagcattggtatggattagtaatatactggatgtggggatgcagaaaaaaatattaaaaattacttctgaaattctggctggaatagaagtgccacttaccaggtaaggaaggttggagacataacatatttgagggtgtggtcaaaagatgagtttgacattatgctatgtcatataaaagacatataaaagactacctattttataattcctttttaataaaatattcagaaaaagcaaaactgtggttgcctgaggctgaagctaggaagattgactacagacaagcatgagggaaattttgggggtgatgagagttttctaaaactggattgtggggttggttgcattactgtataaatttattaaaaatccctgcatcgtataggggcactatattgtatgtagaaagctgtgaaaagattttaaaaatgattgacatgtctgtggttatatcaatgagtactattattattcccattttatacataaagaaaataaaagagaagttaaaaataaaagtttcatggttacatagctactaggtgtaatatccagtattggaatttgaatctttttgacactaagaccttactctcgatcatataatacattcactttctattttaaagttatattatagccgggcacagtggctcacacctgtaatcccagcactttgggaagccgaggcaggcagatcacgaggttgggagatcgagaccatcctggctaacacggtgaaaccccgtctccactaaaaatagaaaaaattagccaggcgtggtggcacgcacctgtatcccagctactagggaggctgaggcaggagaatcgcttgaacccagaaggcagagcttgcagtgagacgagatcgtgccactgcactccagcctgggtgacagagtgagacaccatctcaagaaaaaaaaaattatattataaatgctgcatctcattggtcagaagctctcttgaaattataaaacaaagaagaaaaaagataaagactgggaaattgtgttgaatcagtatataaatcctgtatactggtccttccatttcccctagaaataagtgatacaggccaggcgctgtggctcacacctgtaatcccagcactttgggaggcggaggctggcagatcacctgaggttgggagttcaagatcagcctgaccaacatggagaaacccccgtctctactaaaaatagaaaattagctgggcatggtggcacatgcctgtattcccagctactcgggaggctgaggcaggagaattgcttgaacccaagaggaggaggttgtggtgagccaagattatgccattgcactccagcctggggaacaagagtgaaactcaaaaaaaaaaaaaaaaagaaagaaaaagaaaaagaaagaaggaaggaaggaaggaaagaaagaaagaagtgatacaacaagttacagcatctttgtttattatccactgtgagttgtattaccacactttacttggctctttggcaaactatattatctcttcagatcactagggctaggaaggcccactggtaacttgaaggagtaaatgtatcttctaaaaaatgcttacttccagggagattggatccacacaagtgaatacatatatagtccttagtgtatgctatgattattttactatgtcagtagcataaagattgctatattaataagcattaagtgcctgctgtgctagacagtgaggatgcaagtggccaccaaaatagcatggtccctgccctcctggagcttctttttttcttcttcagtgggggaagcagatactttgcttatgcaaaaataattataaaatttaaagttgtgccaagttcaatggaaaaaatataaggtgttctgagagagcataacaaaggatcctggttttaactggggcctaatggaagacctctattaggaaataacatttaaactaagaccagacagacctgtagaaattagcaaagcaaagggagggaggaaaaagcagctttcctggcaaaggaacaatttgtgtgaaggccctgagacagggaagggctggggttctgaccaccctccaagtggtgcaatggaatatagtgagagagggagaagacatgagaacttggatactatgcaaaggatttggtattttaattcaagagcagtatgatgctactgaggagcagctggacaattgtgtgatccaattaaaattttaggaagatgaacctcgctattgtggagaatgcatacacaagggttctgttggttcatgaagaggtcttaagaaaactatgagctgggtgcagtagctcaggcctgtagtcccatctacttagaagtctgaggcgggaggatcccttgagcccaaggagctggaagttacagtgagctatgattattccactgtactccagcctggatgacagagcgagatcctgcctcagaaacaaaaaccaaaaaacaaacaacaacaaaaacaacaacaacgaaaatctcagaaaactacaggccttattatcaagaaaatgacaggccttattattgagaaaactacttacatttttaaaagctgattttcaaaaaccagattgtgaattaagtgatgctgaataggggaaaaaaagactgataaaccagtgtatctctgaataacccactagatcagtgcttgtcaaactttaatgtgttttcaaatcaccctgatgttttgttaaaatgtaagtcatgtctcagtaggtctagaggagggcatttctgcatttctaacaagctccccggtgatgcctagaccattggtcctcacactttgagtagcaagtgattgggctatactctttattctaaattctaaatgtattctatcttctaatgcctatcagccctcttgctggtctggctaattatcaaacttgagcatttaaaactgggggttttcagagattaattgaagtgttaaagacatggaaatataggtcacatatggcttttcatctcttccggaaatatcctatatatccttacttcttttctacctacctaacctatgtgcctaccccttcacttatgttcaaggttctattatacttcaaaaggactctatgcaatcaaagtgatgtccaagacaaatatacagaaatagtatgaggctctaacactttacatctaatggagtggtttgcatcattaattgaggcttactctgtgccaggcactttacctgccttcttcatttaataggataggagcaggaactcttagaggttcatttcttgttcaaggatatacatctcatctctggcttatatcacagtggactcttttattcactatcctaatcattataattttgtttggtgacaacaattctaaatgcagaaaagttaaggctctttattctgtgactaaaggctttgtattttctaaagatttgtggagctttgctgccattatttcaataattttataaagatcctaggtggtaaataggcctggctttttttctttttgaaatcttctccgtcttcttcttcattagcagtgcaacttcttgtggcatatggtacccaagatcttgggaaaaggattgatcaagtaaagggaaacgatagagagagtgtgctctacaactgagatcatgctccttgtgaaagacagggtagggaaatttcttattgctccctggttcttaagaaatgagagctaacaatgacatccagttttaaaagaaataaaatctgaattgtacttttaaattttataagccagagttaaaccaatagattgtaactcctgctaatttgatagtagctccagataatgaggaagtgacagggaatgctaatttcatttggtaagagataaaactgaaattattaatgtctccacggaaatgctaaatgcctccttacaagtagggtccggctaattgtctgtcttccaacaagccagatttgttggtgtttttccagacaatgttgtgtagttttcggtttggttcgatcccctttcttgtgatcaaagaaagtgattcaaatgtttaatgagtcttgatttggattggagacttgcagaacggctagcctcacagccccaaggctggctttccctaaggtaggtttcctatgcaccgatactggcaaggcgctttggctggaaactctggaaggaagccaaaggaaagtgaagttcctggcgctagcgcgtgtcctgctcagagagcccggcgctagctcattcttcgtgcagttattggctgggactctgtgtgccgctgtcggccaatgaagacgctggagatcgggcccctgcccgtcccctttctgcgccccgggatgaggcagagactgaacagccggcgagcaaatcaacggcatccagaaagccatgtcggactcggcgcccagcgcccaagcgctaacccgctgaaagtttctcagcgaaatctcagggacgatctggaccccgctgagaggaactgcttttgagtgagatggtcccagaggcctggaggagcggactggtaagcaccgggagggtagtgggagttttgcttctgcttggtgccttgaacaaggcttccacggtcattcactatgagatcccggaggaaagagagaagggtttcgctgtgggcaacgtggtcgcgaaccttggtttggatctcggtagcctctcagcccgcaggttccgggtggtgtctggagctagccgaagattctttgaggtgaaccgggagaccggagagatgtttgtgaacgaccgtctggatcgagaggagctgtgtgggacactgccctcttgcactgtaactctggagttggtagtggagaacccgctggagctgttcagcgtggaagtggtgatccaggacatcaacgacaacaatcctgctttccctacccaggaaatgaaattggagattagcgaggccgtggctccggggacgcgctttccgctcgagagcgcgcacgatcccgatgtgggaagcaactctttacaaacctatgagctgagccgaaatgaatactttgcgcttcgcgtgcagacgcgggaggacagcaccaagtacgcggagctggtgttggagcgcgccctggaccgagaacgggagcctagtctccagttagtgctgacggcgttggacggagggaccccagctctctccgccagcctgcctattcacatcaaggtgctggacgcgaatgacaatgcgcctgtcttcaaccagtccttgtaccgggcgcgcgtcctggaggatgcaccctccggcacgcgcgtggtacaagtccttgcaacggatctggatgaaggccccaacggtgaaattatttactccttcggcagccacaaccgcgccggcgtgcggcaactattcgccttagaccttgtaaccgggatgctgacaatcaagggtcggctggacttcgaggacaccaaactccatgagatttacatccaggccaaagacaagggcgccaatcccgaaggagcacattgcaaagtgttggtggaggttgtggatgtgaatgacaacgccccggagatcacagtcacctccgtgtacagcccagtacccgaggatgcccctctggggactgtcatcgctttgctcagtgtgactgacctggatgctggcgagaacgggctggtgacctgcgaagttccaccgggtctccctttcagccttacttcttccctcaagaattacttcactttgaaaaccagtgcagacctggatcgggagactgtgccagaatacaacctcagcatcaccgcccgagacgccggaaccccttccctctcagcccttacaatagtgcgtgttcaagtgtccgacatcaatgacaaccctccacaatcttctcaatcttcctacgacgtttacattgaagaaaacaacctccccggggctccaatactaaacctaagtgtctgggaccccgacgccccgcagaatgctcggctttctttctttctcttggagcaaggagctgaaaccgggctagtgggtcgctatttcacaataaatcgtgacaatggcatagtgtcatccttagtgcccctagactatgaggatcggcgggaatttgaattaacagctcatatcagcgatgggggcaccccggtcctagccaccaacatcagcgtgaacatatttgtcactgatcgcaatgacaatgccccccaggtcctatatcctcggccaggtgggagctcggtggagatgctgcctcgaggtacctcagctggccacctagtgtcacgggtggtaggctgggacgcggatgcagggcacaatgcctggctctcctacagtctcttgggatcccctaaccagagcctttttgccatagggctgcacactggtcaaatcagtactgcccgtccagtccaagacacagattcacccaggcagactctcacggtcttgatcaaagacaatggggagccttcgctctccaccactgctaccctcactgtgtcagtaaccgaggactctcctgaagcccgagccgagttcccctctggctctgccccccgggagcagaaaaaaaatctcaccttttatctacttctttctctaatcctggtttctgtggggtttgtggtcacagtgttcggagtaatcatattcaaagtttacaagtggaagcagtctagagacctataccgagccccggtgagctcactgtaccgaacaccagggccctccttgcacgcggacgccgtgcggggaggcctgatgtcgccgcacctttaccatcaggtgtatctcaccacggactcccgccgcagcgacccgctgctgaagaaacctggtgcagccagtccactggccagccgccagaacacgctgcggagctgtgatccggtgttctataggcaggtgttgggtgcagagagcgcccctcccggacaggtaaggtttagcaagtcatgcttgaccctgttagtgcttttttattcctacatcatattgaggaaggaatggagctgtttttttagtgatgaagatgttttcctggtgatgcattcacactttcaactggcccttcctagatcaaagttagtgcctttgtgagatggtggcctgccagagtgtggtttgtggtcccatttcagggggaagatacttgactcatctgtggacctaattcacatcctcagcactcttttgctatcacaactaaccaatcttgctaagggatggttaagctaaaacacaagatctcagcgatcagagtttagcttggtatcatttacattaggaataagctgctggatacctctaaccagtggcagcttctaggaatacaaaaactacctcattcctccacctttcaagtgattgtgacatttgtattaaaactaatagctttttgataattttcctttgtttatacagatcgtgtacctcattctcagataattttttatgaatgaaatgaaattccaggcatcctttaaattttatttcaagcattctactggaaatgatgtgcaccctgcttacaaaatatttttaccttataacagtaatgcatgtttgctagaaaattcagaaaatacagaaaagtatttaaaaaattaaaactataatctccaaacccaaagataaccatttttaattataaaagtaataatttatttcaaaaataaatctaggcaacccaagaaaacataaagtagccagactcagtggtgtgcacctgtagttcttgctgctcagtgcctgaggtgggaggattgcttgagcccaggagttctgggctgtggtgcactatgctgatcaattgatcaatccactgtctgcactaagttcagcatgaatacagtgacctcttgggagggcaggaccatcaggttgcctaaagaggggtgaactggcccaggttggaagtggagaaggtcaaaactgctgtgctatccagtagtgggatgacatctgtgaatagccactgcactccagcctaggcaatatagggaaaccatgtctctttaacaataacaacaacaacaacaacaatcccagaaactacaaaaggagagtctttttggtgcctccagtgttagtccctgtccttccagccttatttttcttaagtatatgcacaatgtgaaaggtagataaattcatatccttagacaggtaaagcattcattaattcagggtggtatgcaaggatactatccaaggcatggtatccatgcaaggtgactgcaaggcctttgccctggagagaaccctatacatactctcaactgtaggagaaacactgttattttgttactcagtgcatcattgctatcaactcttggatttggcagttagtcaaatgaggttctaccatttaccaactaggagtctgtggccaagttactcaatctcctttctaagcctcttcctcatatgcaaaaagggaataataagtgttttataagattcatgcatgatataatgtatgcaaagtgtttagcatggtgcctggcatatcataactgttaaacaattattagccagctcctagcattttgggaggctgaggcaggcggattgcttgaggccagcagttcaagaccagcctgagcgacatagtgagatcctgtctctacaaaaaaaaaaaaaaatgtgttttcattagctgggtgtgttggcatgcacctgtggtaccagctacttgggaggctgaagtgggagaattgcttgagcctgggaggttgaagctacagtcagctgtgattgcaccactacacttcaaccatggcaatagagtgagaccctgtctcaaaaaaaaaaattatcagctattactataattatttttattagttcctcactcacctaaaatctcaaacacaccttagaaatacacatatgagaacaaccaaaaatgacaaagtagaagcacatatgaaaaggctaagaaagcatgaaagccagcaagaaataactgccgctcttctggtcagcctggaaagcaactggcattttccctagaacaatgttttcaaacttggttgcacattaaaatcacctagagaccttttaaaaattctgaaacccaggccacaccccgacaaatgaaagcacagtctctgggggtgggacataggcatcattttttgaaggtccccacttgatcctaatgtgcagacaaatttgaaaaccacagctttgggaggctgaggtgggtggatcataagatcaggagtttgagaccagcctggccaatatggtgaaaccccgtctctactaaaaatgcaaacattagctgggcatggtggcgcatacctgtagtcccagctactctagaggctgaggcggaagcatcagtgagggagaatcagtgaacccaggatgtggaagtttcagtgagcccagatcacaccactgcactccagcctgggcgacagagcgagactccacctcaaaaacaaaaagaaagaaagaaaaaagaaaagcagtactctggaacctaccaatccatcatttagcatatttgtgaagtaaagtgttattctggtatttgcagaaccagaatccagctttattgggccaggcccaatttttttaaaaaacatggtaaggtctcccagccttaaagtattacatagcatagctctaaaagatcactgtaggaagacataaaatggtatttcagtcatctaagggaaaaaccttcctaaagcactagcccctggacaactattatttaaacatctacagctgttcaatagatattgggttctttttggagggatgtgacaaaattcttgtataattagattgtgatgatgattgtatcagtttagtacatgtaaatacactgaaaaccattggattatacactttaaatatgtgatttgcatggtatgtgaattatgtctcagtaaaaatctagagatggggctgggctcagtggctcacgcctgtaatcccagtacttagggaggctgaggccagcggatcacctgaggccaggagttcaagaccggcctggccaacatggtgaaacttcatctctactaataatacaaaaatcaggccgggcctggtggctcacgcctgtaatcccagcactttgggaggcggaggcgggcggatcacgaggtcaggagtccaagaccagcctggccaacatggtgaaaccccgtctctactaaaaatacaaaaattcaccaggcgtggtggctgaggcaggagaatcgcttgatggtggaggttgcagtgagccgagatcgcgccactgcactccagcctgggtgaaagagcgaaactccatctcaaaaaaaaaaaaaaaaaaaaaatcagccagatgtggtggcaggtgcctgtagtcacagctacttgggaggttgaagcaggagaatcgctttatctcaggaagcagaggttgcagtgagccaagatcatgctgttgcattccagcctgggcaacaagaacaaaactcactccatctcaaaaaaaaaaaaaaaatatctagagatgggagaatcatatggctggcataaaaaggtcaagtcaaagatatgtaagattaaggctttacgatgctccagttctagtaaaacagaccaggtacttgttttggtgtgaaattgccaatataagtatagtactgtacatattagttgtttagcttaggtaagtcttttaatctctttaaactccagtttcctcatctataaaataaagagaatatctactttgcaaacttgttgtgagagtgaaaagtaatgcatataaagtccctgtatggagcaagtactcaataactatttgttgaactaaaaatgataatactgatattcaccatttattagcatccctatgtgccagacactgtaaacaattaaaagttatcattctggtacccagagtacagtatgagacagacatgcaaaaaaaaaaaaaaaaaaagataatggagatctgcatagcataagatgcagtgggaccaaacgggaaaaaacacctaaatgagcctggagaaaggaagaaatgatagaggtggtgatgcttgagctatgatctaaaggttgagtagtagcttgtcagacagtaaaggggaaaggacagggcagggaggggccattgcaagaaattccatgcagagggattatggtatttcattatcactgaaccttaaactgtgtgtgtggccgggtacggtggctcatgcctgtaatcctagcactttgggaggccaaggtgggcagatcacttgaggtcaggagtttgaaaccagcctggccaacatggtgaaacctcatctctattaaaaatacaaaaaattagccaggtgtggttgtgggtgcctgtaattccagctacttgagcagctacttgagaggtcgaggcaggagaattgcttgaacccgggaggcagaggttgcaatgagctggtgtcaggccactgcactccagcatgggcaacagagagagactccatctcaaaaaaaaagtgtgcgtgtaaaacagacagtctttgtaggagatgaggtgaagcaagtaggcaggagttagatcctgagttacctttgggccaagccaaggagtttttattttattccatatagatgacagtcactgcagaaatttgaactgatatgcatatatcatgaggtttttttgttttagaaatattattctgtcagtcataagtgaagggactggggacattgggactggaggcaaagagatcttatctctttgcaatagtttgaaagctattgcaatatttgaagagaagattgataaatgcttgaaccagcacagtggcagtacagatggagggagctgactacaataaaatcatcaggacttgttgattgacatgatataggaagtgagggacagggatgagtcaaggctgatccccctagatcctgactaaggaagctgggtggttgacagtgccattcacagagacagtgaattctggcataaacacctaataggtcaggctggtttacacctccatcattcccatgggagaaggtatagaggggtgtgtgtttgtgtgtgtgtgtgtgtgtgtaaaagaacacagaaagccagattcctctttttgacaccagaatattggttcccaccatagtcaaaaggatattcctgaggatcgaggcttggaaaaatattggggaaggataagaactccagttgttgctgctttttttggcagccagtgtaacctaggtaaggacttggttgaattaagaaatttcatgtccagatcaggatggatttttctatttctctgagctctggtgtgtttcccactcagattgcaggtcgtaggtacctacggtgtgaattgtgttgtgtttctgtgcttgtgcaagggagtagctaggttgctgggaggtctggatgagggtgggggtggggtgagatcaagtctccagctccaagaggtcccctggggctaagtgaaaagcttgctcttttgaaatggtcttcgttggtaattaacaaaagatcaagaataccttggtgtcagataaagggaatttgtaggcacaatgctgttggtagctgatctcaatcattcaaggaagctattaaatctatgaacattagcattctgccaggtaaagagatctggtccttagcacctcccagacacactgattctttactgttttgaaacatctccctctcctggcttcctccaccccgcttccatactgtccttgaaatcaatgaatggtaatttagtgtatctagtgtatcactagcaaatgtctgaataagaaaggtttggtttccgctgtgtctcctgttacaatgagaacatgtactgcataaatttaattggctacgttaatgtgtaagccttttctgcaaagagatggatccgtttctgaatattctgcagaagggcagagttttgagtatatggcagtggttctaattagcagttgctccaatacaatcagactgagacggaagctactcatttagaatactggttgatgacaacactggcttgaacaaagtgaccactctccaatggctactctccctctcagtgggccgcaggttgctagggctcaggctgtggctgttttccccgccgaaaaggggcggggtcagtcggtgtgttaggaaaaaaaatgtatatatatatatatgttgtctgcctccccacagagataacaacccgtggaaaaacatgccgttgagcgggaggaaggcgaaaagataggctgggttttttggggggtgggggagcgtggaggatagggtgggctttttcccctccaatgctgcgacgcattaaccctgctgctgttgggacgttctctgctcagcctattggctgagcccgggagccgctgtctgccaatcgggtggtgaaaggcagacaaatctaccccgccaccagcaaaaacggcgcgtaacccttgcggcgccggccgaaccgcgccagagctggcgcggggaaagggagataggtgtctccagctgctgtggctgtttggggcgggtcggcttcatccgcgtctcaggagcaagtagagaattagcgggcggcagcaatgctccgcaaggtgagaagctggacagaaatctggcggtgggctacccttttgttcctcttttaccacctgggttacgtttgtgggcagatccgctacccggtcccagaggagtcacaggaagggacttttgtagggaatgtcgctcaagatttcctgctggatacggacagtctgtcagctcgcaggctgcaggtcgctggagaggtgaaccaaagacacttccgtgtggatttggacagcggagccctgctcatcaagaacccaatcgaccgagaggcactgtgtgggctcagtgccagctgcatcgtgcccctggagtttgtcaccgaaggtcctttggaaatgtaccgagcagaggtagagatcgtagatgtgaatgatcacgccccccgttttccgcggcagcagctggacttggaaattggggaggcagctcctccaggacagcgtttcccgttggaaaaggctcaggatgcagatgtggggagcaattcgattagcagctataggctgagctccaatgaacactttgcactggatgtgaagaagcgcagcgacggcagcctggtcccagagctgctcctggagaagcctttggatcgagagaagcaatcggactaccgcctggtgctgactgctgtcgatggagggaacccgccgagatctggcaccgcagagctccgggtatccgtgctggacgtaaacgacaacgccccagccttccagcaatccagctacaggattagtgtgttggagagcgcaccagcgggcatggtgctcatccagctcaatgcctcagacccggacctgggtcccagtggtaacgtcaccttttatttcagtggtcatacccctgatcgtgtaagaaacctctttagcctgcaccccactactggaaagcttactcttttggggcccctagactttgagagtgagaattactatgaatttgatgtgcgggctcgcgatgggggttctccagccatggagcaacattgcagccttcgagtggatctgctggacgtaaatgacaatgccccttacatcacagtgacctcagagcttggaaccctccccgagagtgcagaacctggcactgtggtggcacttatcagtgtgcaggatccagactcagggtcaaacggagatgtgagcctccgcattcctgaccacttgccatttgccctcaagtctgccttcaggaaccagttctccctggtgactgctggacccttggatcgagaggccaaatctagctatgacatcatggtcactgcttctgatgctgggaaccctcctctcagtacccacagaactattttcctcaatatttcagatgtgaatgataatccaccctctttctttcagaggtcacatgaggtgtttgttcctgagaacaatcgcccaggggacctgctttgctcccttgcagcctctgacccagactctggcttgaatgcgcttatctcctactcactcctggagcccaggaatcgagatgtatcagcttcctctttcatctctctgaacccccagacaggagctgttcatgctactcgatcctttgactatgagcaaacccagacactgcagtttgaggtgcaggcccgggatcggggcaacccaccccttagcagcactgtaacagttcgtctatttgtgctggacctcaatgacaatgctccagctgtgctccgtcctcgggcccggcctggttccttatgtccccaagcactgcctccatcagttggtgctggccacctaatcacaaaggtgactgctgtggacttggattcaggttacaatgcttgggtttcctatcagctcctggaggccccagatcccagcctgtttgcagtctctcgatatgctggggaggtgcggacggctgttcctatcccagctgacctcccaccacagaagctggtcattgtggtaaaggatagtggtagtccaccactctctacctctgttactctcttagtgtccttagaggaagacactcatccagttgtcccagatcttcgagaatcttcagctccaagggaaggagaatctcgtctaaccctctacttggctgtgtccctagtggcaatttgctttgtctcctttggctcattcgtggcactactctctaagtgtcttcgtggggcagcctgtggagtcacatgctttcctgctggcacctgtgcctgtctcaccagatctcgaaggagggaggggcttcccccttccaatgggatcctccgaatccagctagggtcagatgaccctatcaagtttgttgatgtgggaggccactctcatggctgtacacccttggcttctgcacccactcggagtgatagcttcatgatggtgaagtcacccagtgcacctatggcaggggagcctgttcgcccaagctgcccaccctctgatcttctctatgggctagaggtgagacctttgcaggctcaacaaatgcttgagggttattctgatccaggcatatggctaggccatgtcctagagagtactggcctctcagtaagtgcccatagtgatgtcaccatttttgtaagaggtaactatgtggtagacgctgtgctttgtaactgtttcgtgaattaaccagagttgtcacagtttagcattgggggcgggtcatgcctatatctgagtaagaaatgaaagtaattggtgatcaagagccaggctgttgtggaagcatgatgatggaatgtgggagcacaggaggctacagtgcacagggtacagtgcaccaggcagtcacttggacaaaggtggctgttttctctactcttcctgaaagaggggatcagattctgaagtaccttaactctaggttaccatttcccaagggattgaggggaaataaaatctttgtctcccagtatctagtacactgtgaagggacctctctatttgaaacatagagacagcagaaagaggagagaactaaaggaatagagaggcacgcatcagagtggtggcatagatcttttggtctgggtcttaggactcatatcaagtccctactggggatttgaactagatgcggtaaattggaaggttggggcgggttggtcatcacctttggaaaaaacagtaagtgaaatcacttatgtcagaaaactggtttacagttggctgattcatagaaacagccaccctgtgcatctttaagttgagttctcctgaatttggtgaaaccatgaaacctagaagccaagccatccatgcttggcctctgaccaccctcctgggtgacctgattcagccccagaaatgttcccctacccaaaaactgtaacactcattccacatttggggtctggggtgtcagaaaagctaagtcccatgtcagctgacattgagatttccgcaaagcattgctggagagtcagggcaagactttacaaggttcttactaatcttttctctcaccttagcagcattcagcaggatgggggagggtgggggaatacatgggctttgcctctcccagaaggacaagattttgctggttcaagcaaagtggtggaagcttctgaagtcatgcaggaagttgctgggacagaacgctgaggagttttgtatcactttgtcttccctgttgagtaccatctgagctgtcaaactttgctgccaagggggctgaatcaacctgcagcacgaagtgagtggggaggtaggaagcttctgtgacacagatttgcagcctgtgttcccaaggtttccaggattgaggaaactccataattggttgagagcacacagactttttggccaatcagactcagagctgaggtgggagatctgctcttccagcccgcctctcctcctccagctccccagctccactcaaattcagctcccctcccccctgcccacccccgccactcggtgactaagaactgctgcaagcaggcaaacctccgagcagtttttaagaggctggaaggagacataagagacttcagctgctgcattccaagccctgggtctaccttggagacaggacagcacagacttactctccacaaagggacttctgggtcatggggcccaagacactcccacagctcgctgggaaatggcaagtgctgtgcatgttgtccttgtgctgctggggctgggtgtctgggcagcttcgttactcagtggtggaggagtctgagccggggacgctggtggggaatgttgctcaggatctgggcttaaagatgacagatctgttgagccggcggctgcaattgggctctgaggagaatgggcgctatttttccctgagcttgatgagtggtgccctggcagtgaatcaaaagattgaccgagaaagcctatgtggagccagcaccagctgcctgctgccagtgcaggtggtgactgaacaccccctggagctaatccgtgtagaggtagagatcctggatctcaatgacaactctcctagctttgccacccctgagcgagagatgcgcatctcagaatcagcagcatctggggcacgattcccactggacagtgcccaggatccggatgtgggcaccaatactgtgagcttttacactctaagccccaacagccacttctctctgaatgtgaagaccctaaaagatgggaagccattcccagagctggtgctagagcagcagctggatcgtgaagcccaggcaagacatcagctggtgcttactgctgtggatggggggaccccagcccgctcagggaccacccttatctctgtcatcgtgctggacatcaatgataatgctccaaccttccaatcctcagttctacgtgtgggaatcccagagaatgcacccattggtactctgctgctccgcctcaatgccactgatccagacgagggcaccaacggccaactagactattcttttggagaccacacatctgaggcagtgcggaacctctttggcctagaccctagcagtggggcaatccatgtgttgggtcccatagactttgaggagtcacgtttctatgaaattcatgcaagagcccgtgaccagggacagcctgccatggagggccactgtgtgattcaagtggatgtgggggatgtcaatgacaatgccccagaggtgctattggcctctttggccaaccctgtcctagagagcacaccagtgggcacagtagtggggttgtttaatgtgcgagaccgggactcaggtagaaatggtgaagtgagccttgatatctctccggacctgccatttcagattaagccttctgagaaccactactcgctgctaaccagccagcctttggaccgggaggccacatcccactatatcatcgagctgctggccagcgatgctggttcaccttccctacacaaacatctcaccatcaggctcaacatttcagatgtcaatgacaatgcaccccgcttcaaccagcagctttacactgcttacatcctagaaaaccggcctccgggctcccttctttgcactgtggctgcctcagatccagacactggggataatgcccgcctcacctactccattgtaggaaatcaggttcagggagccccagcctcctcctttgtgtatgtcaacccagaggatggacggatctttgcccagcgtacctttgactatgaattgctgcagatgctgcagattgtggtgggggttcgagactccggctctcccccattgcatgccaacacatctctgcatgtgtttgtcctagacgagaatgataatgccccagctgtgctgcacccacggccagactgggaacactcagccccccagcgtctccctcgctctgctcctcctggctccttggtcaccaaggtgacagccgtggatgctgatgcaggccacaatgcgtggctctcctactcactgttgccacagtccacagccccaggactgttcctcgtgtctacacacactggtgaggtgcgcacagcccgggccttactggaggatgactctgacacccagcaggtggtggtcctggtgagggacaatggtgacccttcactctcctccacagccacagtgctgctggttctggaggatgaggaccctgaggaaatgcccaaatccagtgacttcctcatacaccctcctgagcgttcagaccttaccctttacctcattgtggctctagcgaccgtcagtctcttatccctagtcaccttcacctttctgtcagcgaagtgccttcagggaaacgcagacggggacgggggtggagggcagtgctgcaggcgccaggactcaccctccccggacttctataagcagtccagccccaacctgcaggtgagctcggacggcacgctcaagtacatggaggtgacgctgcggcccacagactcgcagagccactgctacaggacgtgcttttcaccggcctcggacggcagtgacttcacttttctaagacccctcagcgttcagcagcccacagctctggcgctggagcctgacgccatccggtcccgctctaatacgctgcgggagcggagccaggtgaggggctcggcgccgccccgggcgacccctgggggcggcactggagaagccgcccgtcctcataagggattgaacttgcatccactcctctccggccggcttggtcgctggctgcgctccacccgattctcgggatcattggaccgtttgcgcgaaaccagagtggccgattaagggatggggctccgagcaccgggggtggtggcgactgtgggcgaggggaggtgggaccgacccccacccctacactcaaaaaaggccggggcctccttcgagcttccggtgaatttcgggcgatttccgcgggtgtcgggggtcccgggaggaggcagtcacagatccacccctgcagccagcctcctaggcgccggctccggcacgcttcgccggtctgtagatttcctcttcgatttctccccagctcccagcatctgtgacttcactgttaccctccctatccccgcatcacccaaccgcacctgtctgcgggacttaggtgtgcgcgcggggctcatgcgtgtcctccctgctggccacccccacggcccacacaagttgcacgggctcgccacgccccgccaacacgtgcgcggacgcacgcacgcactcctcgcacgtgggcttacgcgaataccagctttcactgccactcgctcgcggccagattcacaggcctgttccggtccactcgcagctcccctctgccgctccctccgccgggctcaggagtactcgtagctgattgtgcgcgcctgagggtcccagatcgcggccgcccaggaccaggcgaggactccggagcctcctctcacctctcccacctgcgccccgggctgggccgggtcgcctggggggcggcctgagcgaggcgcggggccaggagcgctggagcgactgccgctctaagtgccgggcgggcaggactctacgatccttgggccagaggtccggatggtcccgggactccgtctcaagggtcggcgacccctcaacccagaagcctcgagcaggcggacaggcagagctgcccagtggccgaggcgcggcagggctccgcgttgggcgagtgagtgagcctctataggacagcaggactgggactccagtggcaccagcggccccttcctcccgcaggaagtgaaagcctcgagcgccctggctctcaacccccagagatacaggcttttggcgccgtcgtgatcacaatgtgcccagcgatctagggtcagagatttggaggtgaccaaactatctgacactctaacaagtcctgtctcctctggcagatggaaagctataggctctgccagatgccagggtgcccttatgtgtgaggaaactacaatagtaaaaaacacaagtttctccaactccaggagcttttattcaaaatatatcaatgcctaactctgctcctaggactgtattttgaaacacccccaggtgattttgatagctgattgagagaaacttactatataactcctttgagaacctcatctcatttgctcttcccaccattgctgttggctaggtactaacatgcctctcttataacagcttcacagaggtcaagtgacttgctcaagttcacagagcaagtaagagagattctaacccctgtctaactccagaatgtgtgcttttaatttcttggcacttggaactttaaaagcttgaggacaggagaggggagttgcctctgctgggattttgcttctgctgggatggggcaagggtggggttccttcccttttaggaccttacatgtggggaaagtcttctgtggctcctcatttctgagcagtccccgcagcgcaaacttggccagttatccttttggagattgagttcccccagctccgtttcctcctatcacaatcactgcatttccatgtagattctgctgtgtctaagaatacagtggctgagggctggccatccctgtgcccttctccatggcagccccagaatggtgctggtgactcccgatacacctggaatgctaggtttctgggttctgctcatatcactgccacctgtgagccttgagtgagccactggcagttccggagcttccttctccctggagtaatctgagatactcacactctctgcttctgggagcaagtatgagtattaattaccagcccaccccagaaccagtgaggaggtggctctaggagtgctccatgagagtgtgtgatgggataacacaccccctggaaagaccagaagggactcaggaatgaagtggctggccagagccccacaccttcagctaggtgggagatggctacacatcagccccttgggagccctggagacttagttggccctgcttggaggctgtgggagctggatccctccccgctgcatcccttccatttttctccgtctcagacagagcagccttgttctcttctccttagtcacagaccattgtctggcacggagttctaggggtgagaagtgtcccgggacttggatgccccgcaaaggcccaatctggcatgactcctaaattaataatgtatttagctgtgggaagagattcttgcaagccaagggcccagagaagatgtccctgtgaatgtgtcactgcacaacctggcaccaaaagggttaccaagaacagcagccatcttgctgcagaggatgctttgttcccagctgaggagttgaataaattcattctagggctggtagaattctcattgaaaagcctcctttgccactttagggggctttgtctgcacctcttcccccagttccacagaagatgccttcagtccttgaattttggctcaggagttctgactctgggggcagggaggaaggggccatttctttaggaaaggagtctcagcttgctcactgtggtcagatgaaatgtgatttatctcttggtttctggtacctcagacctctgagacctgaggtgtattttgtctttggagatgagtccacccctgccccctcttagtccgttttcttctctgtgcccactcccctccttctctcccggcccatccctaggggctcgggtgacattctaacttctcacgggtactcagcccctttccctctgttttctccacagcaagccccgcccaacacggactggcgtttctctcaggcccagagacccggcaccagcgggtaggtgactgattctccagcccaccctcttctctgcggcattttctcagggatgacgtgggaggagatgggggagggcccagcatttgctacagatggcttctccctcagtttgagatcccagggaggtcttggtgtgcggggggctggcacacagaccccggaaggaagaggcgactgccctgactgttcaggaagctcaattcacatgcttgccccttccctcctcgccacgaccggcaccttttcctatcccctgagggcactgtggaaccaaaggatggtcttaagctggtctctgggtgaaagcgaggctttctatgcccatgtactgcctaaccccctcccctgagttgagctgggctccattatgacctggggctcaggcagaaaagcatttgaccggaggaggcggtccgcactcagcgcctcctccagagcctccagagccgaggctgactgcagcctggggagagtggaggcagcacagctggaggtggaactgaggaaggactgggcggggcatggagcaggcccccttctccggcccctcctcccactgtcctctgcccctacttgtcctgctctctgtctgtggggtctccgtgtctctgcccctttttcttgagtttccgtctttgccactttctcttacctctcagtccttccctcagtctctatctcgctttgcaatctctgcctctccctctcttctccatctctgtcttagcttccgtcttgattgctgcacctcagcctcagtccctttcatttgtctacttgcattgatctgtgccgcccactgtgcctgccatggcataagtgctcaataaatgtggagtgagtaactacacgggacccttagtctctttctccttctctatctctgcctccctgtccttgtcctggacctcttttctgtttctcctttcaccgtttcctagcgccttgtgttcttctatccccagcctctatgtttctctgtctctcactatttctgctttcctctctgttctttgtctctctttgtctctgtctctgtatatctttctttgtctctgtctctggtctctgtgcctgttgtctttttctgcctctttctctgttactctttctttatctctctttttcttttatcttgtcttttttctctgagcctctgtctctgtctctcatttttttgtgcttgtgggcaagccagcacacacaaccccccacccaccacccaccaacaccccgctctcttccttccctgcccctcacacactgagcctttgatcgcagctctccaccagacaccctcccatccaagcagccccagctgctcatttcaatctggtatgaattcctgctgagacaggaaccccctgcgggctgaaggggagggaaacttcagcagaaagaccttcagttggtctgagcagagtgggataggctctgcgccaggcctcccagttagaagtcaggagcctggaggagtctcagagcccagggagagaagcaggagcttgggccaccttaccctacctcctcaatggttgagtacttgctgtccacatttgccaagttgctacagatgctgagcttccaagagttatctttcccccatcctgcaaccaaccaaacccttgttgccacaaggacccaggagcccttggtgtatggcagagattccagcttctgggcatgcacagtcctgtcacccattttaggaacgcaaagcgcttcttagaaggcccctaaaaagcagcagatcaaaaggcttgggctgcccttgcccttcctttgaccccagctgttgtccttctccctgctggccttgccaaccttctcataagttatccattaagtcattaatgtattcattcgttcatttattcaacaaatatttatcgagcatctactatgagcagggccctgtgctaaacattgggctataggagtgaacaagtagatgtgatcccagaactcataggcttccagaccagcagaggagactgaaaatttgcaacaagtaacacttaaaaaaaaaaaaaaaggctgggcactgtggttcacgcctgtaatcccagcactttgggaggccaaggtgggtagatcacttgaggtcaggggtttgagaccagcctggcagccaacatggtgaaaccccatctcgattaaaaatacaaaaattagccaggcgtggtggcaggcacctgtaatcccagcgacttaggaggctgaggcagaactgcttgaacccggaaggcagaggttgcagtgagctgagatcacgaaaaaaaaataatctagccacaaatcacagtaagttctgagaggcagagaacaatgtgagtgtaatgggggggggaagatcagagaaggcttctaggaggaggtgacattgagaagttctaggccatttatgttccctctacctaccaccaccccaggccatacactggctttgaagcagaattcaccattgaacctggaagccccaccaactgcctctcatgtgtcctctggggtgagcaccttacccctgcctcaactcccattccatcaaatgagaggcttagtggcctggaatacatgtgggagctcttggagatatggaggagaaggtgcggaacctctctctctctcctctctctgcttccttagttaacttgtggaggatgcaacaaaccttttttttttttttttttagacagagtcttgctctgttgcccaagctggagtgcagtggtgcgatcttggctcactgcaacctctgcctgccaggttcaagcgattctcctgcctcagcctcccgagtagctgggacagcaggtgtgcaccaccacacccagctcatttttgtatttttagtagagatgggtttcgccacgttggccaggctggtttcaaactccccgacctcaactgatccacctgcttcagcttcccaaagtgctagaattacaggtgtgatcgcccccggccacaacaaacatttttgattcagcggctccaaagtgaaataagcgttaggatctagtccagtaacttcaacttctctccttcattcattcaacaaatggtcagtgagcactttctgttggccaggcagtgttctcgatgtgggaggcccctgccctcaaggagtttacagtgcactgaaggagacaaatattgaccaaataattacaaaaataaatgtgagactgaaactgtcataagtgctaggtagaattgtatctggtggtgtgggcgtataatagggatttgatttagggagcaggaggacatcctggaaatgaagttgtgctgagatctgaaagacaaatacaaattaaccagctaaagaaaagaaggaagagcattccagatggtcaggcataccagcttcaaagcagggctggtgttgagttcttcagtaaacttggttcaagatcaagccagctctgggtcacactgcctacacagaaggaagagcattccaaatgggaaaagcctatgcaaaagccttgtggtgaggcctcctgggatcaagggaatggcagggagttttctctttgctggcactggagtgaggggatgaagaggagaggttccttttatccagtctaaccctggttccagccttctgttgatgccctgcctcactccctccccaccatcttgcccactgccctccagcctggtctggtcagacacaccagcttcaaagcagggctagtattgagttcttcagtaaacttggttcaagttcaagtcagcactgggtcacactgcctagacagaaggaagaagacctggccaggtgtggtggctcacgcctgtaatcccagcactttgggaggctgaggtgggtggatcacctgaggtcaggagtttgagaccagcctggccaacatgatgaaaccccatctctagtaaaaatacaaaatattagccaggtgtggtggtgcacacctgtagtcccagctactcaggaggctgaggcaggggaatcgcttgaacccaggaggcggaggttgcagtgagctgagatcacaccactgcactccagtctgggtgacagagcgagactccatcaggaaagaaagaaagaaaaagagagagagggagggagggagggaaggaaggaaggaaggaaggaaggaaggaaggaaggaaggaaggaaggaaggaagaaaagaaagaaaaagggagaaaaaatgaagaagacttacattctgaagttcctgcttggcacatgcttctcctccccaccactatcccttctcaggtcatcctttgggtgtctgatcccaatagctgttgtctcaagctctgagcccagcaaaccatttcccccttcttaggctgtaacccaggccctgccctgcagctgtccccagcctctgcacaaagagtctccatttggtccctagactgttctctgatggctccacactaccatccctcctctgagagacagtatccctgctctctctcagtttgggcagtcattcaacaaacaaatagcaacttaatttttttccacttataaaatagtacatgctcattatagaaacatgaaaaatagaaaaaaaattaaaaggaaaaccacccatcattttacaatctagggagaaccaccaccaactacagtttaatatgaaacatttcaaatatgtacaaaagtagagagaatggtgtcatgaacctgtatgataccactatccagcttcaactaatgccttatcttgtttcacctatatccctacccttatcctgtccttggattcttttgaagcaaatctcagacatcatataatttcatcttggtctccaccatctttaacagatgacttttttttttttttttttttttggagacagagtctcactctcttgcccaggctgtggcacaatctcagctcactgcagccttcgcctcccgggttcaagcaattctcatgcttcagcctcctaagtagctaggattacaggtgtgcaccaccacacacagctaatattttgtattttcagtacaaacagggtttcgccatgttggccaggctggtcttgaactcctggcctcaagtgatccaccctcctcggcctcccaaaatgttgggattacaggtgtgagccaccttgcccggccagatgattctttcataaggtccacattttatatttgagtgagtgtctcttaagtatcttaatgctcttttaatgtaaaagacttcccctccatcttccatttttgcaatttatttgttgaatccctgccttttcatatatatctttctaaacttttctttgtgtaatcaaagaacatgcatgagcttcatttttatttttatttatttatttatttatttatttatttatttatttattgatacgtagccttgctctgtcacccaggctggactgcagtggcgcaatctcggctcactgcaagctccgcctcccaggttcacgccatgctcctgcctcagcctccagaatagctgggactacaggcgcccactaccacgcccggctaattattttgtatttttagtagagacggggtttcaccgtgttagccaggatggtctcgatctcctgacctcgtgatccgcccgcctcggcctcccaaagtgctgggattacaggcgtgagccaccgcgcctggccgagcttcattttaaaaaaatctcattcacctaaataagttgttcacaaacttgtcacactttcatgtgacactttattcacatattaagaactgttattcccagtcatacggtacatttcctactagttttttaaaaatagcaactgaggccatactgtccaacagaattatagcttttttcttctttgcagtgtatcatgagaatttccccatgtctttcaaaattcttcccaagtcatttgcagagtaactcctcttatgaatatacatattattttacagaataagtcctcatatgaatatacatattatttttctaatgctaatgggcttttgctacattagaaaacatacacattcatttacaattttttttttttgagacagtctcgctctgtctccaggctggggtgcagtggcgccatctcggctcactgcaagctccacctcctgggttcaagcaattctcctgcctcagcctcctgagtagctgggactacaggcacgcgccaccacgcccagctaatttttgtatttttagtagagacggggtttcaccatgttgaccaggatggtctcaatctcttgacctcgtgatccgcctgcctcagcctccctaagtgctgggattacaggtgggagccaccatccccagcctcatttacattttaacacaattaaattcagggtgttgtcagggtgacttcctagatttctcagttttttgagcatgatgtagggagtattttattatagtccagtctatgggatattcccttatacacacacacacacacacacacacacacacacacacacacacaccccaaactcaatagggcaagaaccatattcatcatctcttaaatcctaggtcctgtcacaggccactgcttggaaaatagttgactaaatgtagtccatttcttccatttttacttttcactattccccaaatcctggaagagtccctcatatctgctgctggggctccaaggcctccaagctgaagcccagtacgttgttgtgcataagatcataggccctggaatcatattaggctggctttcaggttgcaactctaccagttccagctgtgtgactctggtatagtctctcaacctctctgagccctgttttcatctgttggaaaatatagataatcacaacacttatctgcagggtgattccgaggataaaaaagacaaatatattacccagtcagcttagaataggaagctctcagtaaatggttaaaaaagaggtctctctccctctgctcatctcttacccagcttcacataattggcagcccacccacctgtttggccctcaaccttcaaccatttcccaggacgcctccttacactcctgatcatcatggttccaaccccactgttccactcagctttgttccctcaacaccactgctccctgtgacaggtcatcctcctaacctctggcatctggtcccgttgtctccctgacaacccgcatgctctcctccctgcaacccccgccgcttgcctgctctccctactttattcccattagcccccttcacctggggctgagaacacctggccttgaccctgcaccctcagccaggcccacagagctcagtcgggccggaagtaaggaccccagatattcagttgaggaatttaacattaatacaataatatagaatccaccagcagattttcataaatgttctgtgtgttcttttatccttttttttaatccaggattttatcaaggagcatagattgcatttggttgtcacgtctttcctctcctttaatctggagccagctcccagtctttttatttttttaatgacatggatatttttaaagagtccaggccagttgtactttaaaatgtccccgaacctggatttgctggctattctctgatggttagattcagattacacaccttggtaggaatacttcccgcagcatcacactgggactcatctaacgtcggcctgtcccactatcagtgatgccgagtttgttcgtgtggtaaaaacagtgtcccagatctctccattataaaaatatatttttataaagatattttaaaatatttgtgaaaatataagtaatctgtggatgatactttgagataggcagcaacccttcatgcaattttagtattccctgatgatccttgcctgtatctgtttttacatcagtgattacaaagcggtgatgttctgtcattccttctacatgtatttgctggtattcttctgaaaattacctggatgatttcttcagatttaaattcactgtcttttccttggggaagcctggactggctgagctgcctaaccctgactctctgtcttttttttttttttgacagggagtctagctctgttgccaggctggagtgcagtggcaaccttcacctcctgggttcaagcgattctcctgcctcagcctcccaagtagctgggattacaggcgtgtgccaccatgcccggttaattttttttttttaatatctattttagttgagacagggtttcaccatgttggtcagaatggtctcgatctcctgacctcgtggtctgcccgcccctgcctctcttcataccctctggtagcccctgacacagcccatggcaagtatcacaattgcaattactctattgtgtaattatttaaaatcagcctctcagtgcccaccatgagcaccgtaaagatggacagtttctatcatactcacagccacaaccccagcacctggctctgtgtctggtacatagaaattgctcaagaaagaattgttggaggggcgcggtggctcacgcctgtaattccagcactttgggaagcggaggcaggtggatcatgaggtcaggagttcgaaaccaacctggccaatatggtgaaaccccatctctactaaaaatacaaaaattcgctgggcatggtggcatgtgtgcacttgtcgtcccagctgctcaagaggctgaggcaggagaatcacttgaacctgggaggcagaggttgcagtgagccgagatcgcgccactgtactccagcctgggtgacagagcgagactccagctcaaaaaaaaaaaaaaaagaaaaaagaaaagaaataattattgaatcaatggaaacagaattacaactcttcccacttttgggaaggagaattgagattcctgctttccccttcaaccctagctttatgtttgttgtgatggtatagaggtcacacatggcagccttgtgtctgttcttaggctgagttcatctacttagggacggggaatcccagattgggcaaaaccaaaagcagggacagaccttggaaaaattgtaaagcagttcttggttgtgctcacccaccatgacaaaatatgcacacacacaacgcaacacacacacagacattttcatgccttcaaggcctaccctacagcctttcccatggtgccaaacccttcttcttaccttacagtcacttaactgtctctgctggtctcttcccactcatttaggcaacaaatatttattgaaaaacttctctgagccagatggtgccaaacagttacctaaagggcagactgtgtgtgtgccagggctgtttcccgccaacactcccctgcaaattgaaataatttcatccttggaaattcaaaaaaatcatgaaaattgtcactgtgggaaaattccaagtagagctgaaccttctaagaagcagagagttcttcttatggtttagtatttttttaaattatgaatcatttcatgttttttcaacactcggagtttctaaaagtctcacttaggtccaagtgctaggctttgtgctaggtgcttcagtaggaagcaggtggagtcgctgcctcacagaagccagtgtggtggaggaacagacaggcactacaacagctgcagtgtgactagtgccatgtggggcagccgctgggatgggagtacagtggaggcacctgcccagtctgagtggatctcctctgatatattttattcgtgtcatcatggcaaatgttgggggactggcattctagggaacaccatctgcccaggattcacagcaagagggaacttgagggataggaaagtgcaccttggaaaaggtttgatgatagagtgtttgagggcggggggtgggggttcttgtaaaataggaggggcaggttcttctatggccgtggattttactctgagggcttaggaagccattgaattttagaaatttcttctccctgctccagggtctcttggggcctcctacatctccccctaggtacctcctaggtccccactttttctctagctctggaacattctcttccatttcccaccttcacagtcctctggagaaggtctgatctccctcactatgacaggaagccaggctctctcatggtgggtgggggaatgcactatgttcaatgcattggaccagcctggccaacatggtgaaaccccgtctgtactaaaaatacaaaaattagcctggcacagtggcaggtgcctgtcatcccagctacttgggagactgaggcaggagaatcgcttgaacccaggaggtggatgttgcaatgagccaagatcgcgccactgcactccagcctggatgacagagtaagaccctgtctaaaacaaaaagaaaaaagcatcggaggcagcaaagagctggtttgagggactgacttgtgggattctggcttctgaaggattgtagaagtgcctcctaccttgctgagagaaacaggtcttgggcatggggtagggttagggtactaggtttgggagccctgggagaggacaggaggggcatgagctgtgccggcctgggagtctgtgctcaccatcctactctctccccagctcccaaaatggcgatgacaccggcacctggcccaacaaccagtttgacacagagatgctgcaagccatgatcttggcgtccgccagtggtaagtggtgtcagtgtgtgtatggaagagtgggagacctggggttctggggtgcatctcacagccaccatgcccacggactggatgtcaaacctgtgtagtttctccagatctttcggcaggtctgaaaggacccacaattccaaacataaagcctggaattgtggctaaggaacagcagaggggttgggggtcctgggatgcctggaggagagcgaacaaggaaaagactcatggagggaatagtggttacaagtctagctctggaatgggacagtgtagctcaggtcctagctctgctactatccttgggacttggatcgacttgctcaatctctctaaacctcagtttcctcagcctagaaagtggggacagggaccccaaagggttgttgtagagattaaatgagatgataccacaaagcatagagttctgggcctggcgcttggaagccctcaagcaatgaaagtgggtgtagaaatccccagccgagagaacacctcctctttatgcgaggctcctcttttgctgcccctaactccagagtaggattctggttttcccataaggttgactaagggcttcctttgtaatagagattcggctagtggtggttgtccctgaagagtcactagggcccagagcaggagaagaagaatatcatttgtccttaagagcacagcctaagctgggcgtggtggctcacgcctgtaatcccagcactttgggaagctgaggcaggaggatcatgaggtcaggagttcgaaaccggcctggccaacatagtgaaaccctgtctctactaaaaatacaaaaattagctgggcatggtggtgcgtgcctgtagtcccagctacttgggaggctgaggcaggagaatcgcttgaacctgggaggtggctgtggtgagcagaaaatcgcaccactgcactccagcctgggcaacagtctcgctctgtctcaaaaaaaaaaaaaaaaaaaaagagcacaggctttagaggcaggccaatctggattcaaatcctggcacctggcaccaccacttagcaatgagtccttaggtaagttattaaaccccctcggtttcacttactattaatgggcacagtattaacggatctcattgtggtgttaccagggccaaatgcaagtccctcagcacaggattggcagagagtaagggcacaatatattattatctttgctgacccaaacccgttttttactgggtagaaagcagaattagaataatgcctattaataaagactagcttctggagcagcaaatcctgggcttataaggaggctggcagaggatcaaggcattgccctatatcatgaactgatagccctgccctccagcatgtctggaggactggtgggtagagaaccaggtgaaatcacaagaagcactgtcatcacacctgggcacatactaaacaaactttaggggcctcctgtcaatgaatcctctcaatagctctgcaaggcaggtctgatttctcacactcgacagatgagagaaccgagaaggcacttgccccagggtcctcagttttgagctgccaagctgaggttctaacctggctcaactcctaagtttatgctctttctactatagggaccatggctgcctttggatccagcctcggcttctctattacctgagcaggatgagaggctgtcctcttcctcgagctctgctttattcttccagatcagggttgccagataaaatacaggatgcccagttacagttgaatgtcagataaacagcaagtactatttcagcataagtcagtctcaaatgttgcatgagacataatgtactaaaaaaaaaaatgctcattgtttacctgaaattcaaatttaactgggagccctgtacttttatttactaaatctggcaactctaccccagatgtctgtgaggttaagtggggccaggcctacagctgacggaaggacagagagagaggtggcagggactgctggcctcctgaggcagagctgtcccaggtctggtggggctatgattccagagaggccagagactgagtatgaaagtggcaggcggctgggtctgaggagatgccaagttggcctcttgagggaaataaacaggtatatttagctgttgtggccttgcgccctgaggccaggaagcagctttttagcctaaatccagatgttaaaaacagaaatgaaatcagtatttatggccccaaaccctccaagcaagtcatgcagctcgttcccctgtcaaggcctcccacctttggcccacacagggcctgaccctcgtctaagcctgcgccctggggaacggaccctgggggtggaggtggtgggtcaggccctgctctcactttcacacccgcttcctagccctgaaaccagagaggttcctgaagtccagcccagccaggcctgtggggctgctgagaggggttaagtaagagggagagtaaaaaccgacacttgggaggaggcttttaaaataaacatctgcggggagggatgctctcaaggaggctgcggtttgcagctcagccagctgtgttccagctaatcagcctccttgggctactctggagttgctgccttggccctgggatggggtaggttaagaggacagagggaggtcagggagctgggggctgagtttccctgagtagaggctggcacaggagagaaggcatcacccccacctcgtccaggccagaagatgtccagcttcttgaggctctcctaagtctgcctctcctgggaccaagagaaaatcccggtccttgaccaaggtgggccttggggggagtggggtgtagagggaggggcactggagaactgactctacagaaagtcaaagctggcaatccaacttcttcccctcagatttatagatgggaaaacaggcttgagccacgcagagacttgaccaagctcacacagttccttagtggcagagcagagcaaatattctctttcttttacattctggatttccatatcttctctccctcctggtccagcccaacctcagggcaccccccacgaggtgggcgggggatggctttgtcacttgcacccactcggggtgctactcagagatcttgggtgcacataggacgtgggtgggccgagcttctagctactccgtcaggcccttcctgtcattctgtctctgcctcccttctccctgcttctccgtgttcctcctcattcttttctgtgtgcagggagactacaccccccaccccgctctttctctggcgcctctgaggtcccccctctagcccctaaatcactctggaatcctggctctttgaagccagatctgggcccccctcccctaccccttccattcccaggctgggaaaggctgaagaggctgacggctggaggggagggggcggggcggtggcggatctggcttccttttggagttaattagggaaaacagagaaatgtcagcggaatgaaagggctgggggtgggggccagctggggtaggagaggaggaagtgggcagctgctccctcccactcaacccctctcccccgcccccagaaagctctcagctccggggatttgcgacatgaaatgggggctgtagaaacctgagcgctggtgcgtgaagagaaaaaccgaggcgcatcccggctctcccctcccgtgtgccctcctcctcttatgccggcttgaaaatatttcctgtctctctatttctcaatccctggttgatgtcccaggattactcagcctctccggctttagtcactctcgctacccgctcccagggtccagggtggaggcagagggaggctgggagagaagctctactgccagctgggcctgggctggcctgggcatccctgaggttttaactgtctcctaaccacagaggatctcagggcctccagcagcgagccccaatgagtcaaactcttgtttcctcctctcccacccccgacccagtcagggcaggtgaggggtagaggtgatggcatgctggatgtgacggtgttgatgatgtattgcacaggatgaagcaccatctcatttagtcctcacagcagccttcacagtgcgtacaaatcagctggcaattccgagaggctgcattctaaacaagttcctgggtgatgctgagccagggccagagtgtggacttctctgggccccagtttcttcttctgtacagtgggacgttggactggaggtgctgtctgatgtcacctagctgtggcactctgagcctgtgcctaaagtgtccctgagatgtctagtccccgagatcatcatctcctcagcttcatagagccgagctcttctccatcttctctctacctcccattcactcagaacagggataaggtccaagctgctggtggtgatggtgactgactgtcccttccagcatgcgcttaggtacacttgggcctgaatgcccctctaacaaatgctaccgggtatggccttggtccttctaacacttggttccctcatctgtaaaatgagggtcataccacatagctggctgggctgttatgtagaggttaaaagtgattgtgcatgtgaagcatccagcagagtgcctggcacacagtaggtgctcaaatgctgttttgaaatacaaaaattagctgggctagtggtgtgcacctgtaatctcagctactcaggaggttgaggcaggagaatcacttgagcccaggaggcagaggttgcagtgagccgggatcgcgccactgcactccaggctgggcgacagagcaggactccatcttaaaaaaaaaaaaaaaaaaatgctgttttgaaatggaggcttggaagagcactcttcacccccaccccacacacttactaacggaactaccgaatctctactcgtgccaggccttgcttggcaaaggctaggggcatgtaaagccatggtttcatggctgctgccctccaggagcccatggtctagtgtgggagtcagaggctcccttgagaaagccagggcaaggaactgagagcccgtgtcacagccctgagagaaataccagcgaatgtgttttgagcacttacatctaccaggcactattttacgtacctgacatacattttcttatttagcattcactaaaaccagaagaggtggttaccattatcatccccattttgcagatgagaaaactgaagtggcataaggaggttaggtagacttgcccaggatcacagtgagtaaggaaaggagctaggaatcaaacctagactttctcactccagagcctcttaacctctaccctcaactcttgtgaagagagactaccttggtgacccctatattcccagtgctcagcgtggtcaaggcccagggtgctgtataggcattcattaactgctggggatataagacagtgactgttgaggaccctaagtttagctcccacctgatcttcctctgtctctgcagaagctgctgatgggagctccaccctgggagggggtgccggcaccatgggattgagcgcccgctacggaccccagttcaccctgcagcacgtgcccgactaccgccagaatgtctacatcccaggcagcaatgccacactgaccaacgcagctggcaagcgggatggcaaggccccagcaggtggcaatggcaacaagaagaagtcgggcaagaaggagaagaagtaacatggaggccaggccaagagccacagggcggcctctccccaaccagcccagcttctccttacctgcacccaggcctcagagtttcagggctaacccccagaatactggtaggggccaaggccatgctccccttgggaaacagaaacaagtgcccagtcagcacctaccccttcccccccagggggttgaatatgcaaaagcagttccgctgggaacccccatccaatcaactgctgtacccatgggggtagtggggttactgtagacaccaagaaccatttgccacaccccgtttagttacagctgaactcctccatcttccaaatcaatcaggcccatccatcccatgcctccctcctccccaccccactccaacagttcctctttcccgagtaaggtggttggggtgttgaagtaccaagtaacctacaagcctcctagttctgaaaagttggaagggcatcatgacctcttggcctctcctttgattctcaatcttcccccaaagcatggtttggtgccagccccttcacctccttccagagcccaagatcaatgctcaagttttggaggacatgatcaccatccccatggtactgatgcttgctggatttagggagggcattttgctaccaagcctcttcccaacgccctggggaccagtcttctgttttgtttttcattgtttgacgtttccactgcatgccttgacttcccccacctcctcctcaaacaagagactccactgcatgttccaagacagtatggggtggtaagataaggaagggaagtgtgtggatgtggatggtgggggcatggacaaagcttgacacatcaagttatcaaggccttggaggaggctctgtatgtcctcaggggactgacaacatcctccagattccagccataaaccaataactaggctggacccttcccactacataatagggctcagcccaggcagccagctttgggctgagctaacaggaccaatggattaaactggcatttcagtccaaggaagctcgaagcaggtttaggaccaggtccccttgagaggtcagaggggcctctgtgggtgctgggtactccagaggtgccactggtggaagggtcagcggagccccagcaggaagggtgggccagccaggccattcttagtccctgggttggggaggcagggagctagggcagggaccaaatgaacagaaagtctcagcccaggatggggcttcttcaacagggcccctgccctcctgaagcctcagtccttcaccttgccaggtgccgtttctcttccgtgaaggccactgcccaggtccccagtgcgccccctagtggccatagcctggttaaagttccccagtgcctccttgtgcatagaccttcttctcccacccccttctgcccctgggtccccggccatccagcggggctgccagagaaccccagacctgcccttacagtagtgtagcgccccctccctctttcggctggtgtagaatagccagtagtgtagtgcggtgtgcttttacgtgatggcgggtgggcagcgggcggcgggctccgcgcagccgtctgtccttgatctgcccgcggcggcccgtgttgtgttttgtgctgtgtccacgcgctaaggcgaccccctcccccgtactgacttctcctataagcgcttctcttcgcatagtcacgtagctcccaccccaccctcttcctgtgtctcacgcaagttttatactctaatatttatatggctttttttcttcgacaaaaaaataataaaacgtttcttctgaaaagctgaacgtttctgtataagcgatggaagctcctggcatgtgtgcatgaagtgatgagctgaggtgggtgctggaagaagggcggaatcgggaggccactttgtgtcattgcgcgtctagatgtttccgaattgcgtgtgtgtgtgtgactgtgcaatatggttgtgtatgcttgcaatgccgttgtgcctatgagacagtgtgcgattgtgtgcctatggatctgtgtaccgtgtgccattgtgtgatcggtccgctgtgggggtggggatctgagtgcggcgtgtcagtgtgcagtggagtgtgcagtctaagcttgcggctgtctccaggcagaagaggagaccccggcgcgggcgggggcgggttggcgccgggcaaacgccttgggtagaggggagaggacgtttcgttagttcccgccccttcctgactaaaattgcctacccgaagcgccccggagggcttcacgggaggagggtagactctcctttgcccccgcacccccacccccgctgcctaggggttttgggaaagccgcgggagtgggagggaatgcgggaggtgattcttccaaagccaagtctgcagctcgagcctcagtttccccatctggaattcgccttcccgctgacatctccgtagcgaagcctaagaaattggagggctcatcctcttcttgcgggggtcaaggggactgaaaggacgtgcaggaaatgagatccatcgcagactcagctcccctccctccttcctgtcggtgcttttccactcactcgcctgctctcccatctccccgccccctccgcctgcctcctcgaagcactgtgggattccgaggttgctgcagccagagaagctgcagaaaaacacggagctgggggtgaagggggacttaaaaggggaactacccggaaggacccaagaacacaaagacagagccactgcggttatctggctggtcagcaagggtatgcggcttcctccgcgctgcggaggctcccagagccaggtcacccattctgccagctcaagtctgttgtcatgggaaccaaaccttccaacttaagaatctgggggcgactttctagcgtgggaggaagggtggtgtgcacggttgctgagatggaagcagggttttgttactcagagccaggctgcggaggggcggggtgccgggcgcctgggttctattccaggcacagcagcagactggcagagcgcgtgagcagctgtggtttgtcccctaattggtatgtgtgcctataaagctctgaaccagaaaggcgtggcctccggggggacgggagggaggcggcaggcaacccatccccacacctcaggccatactgaggaggcagctgcccaggctccagggctatttaaaaggcttttatttccagttccagagcccgcccgaatgggtttgtggtcctctccaggcctctccctgtctatcctgggcctgctcattgctggtctggcttttttgtgcaggtcataacg

SEQ ID NO: 456 - DNA, 107778 bp, Homo sapiens
  source 1..107778: mol_type = genomic DNA
gcttgctcaagagaagtttctaagactggacactgtgaaatgacaaaacaaggaattaaaaatatttctctcacttatatattatttctggctcaattctccaacttttgagtctagaaatgaacttgcatatcagatataatttaagaaaatattctcaggaactgctgggaagattctaaaactattttactgtttttagctataaggaagagaataatgtattatttaatgttattttaaacatagtgttgtttcaaatagtaaataacatttcacaagacatttgaaaataagctttgaagttgactcaaaattctatgctaaacatgtgatccatagatacactgatgactgctggcatttctgtggaaatgaagaattgttttatttgtttgtaattatttgggtttcagttgctttatttttaagaaaaaaaagctgaagtgtctgggaatcctttatgacatacagacattttaattatttcaaacacgttttcccccttaagtgggtagcaaaaaaaataaagcatacttcaggctcatatttttaaccatgcaacaagaaaattgttacaatttctgttctgaggagtagccttcatacttagtatttataaatattgaaatgtatgttaatttggggaaaacataacagatatccatgaaggcttgtatgtcatggtaggtagttactattcgataccacaaaaatgtctcttgcccttaaaaccagaacacgaggctcaccagacagatgactgaatggagtatggaaaatctttatttctgtttttcttaggctatgtaggacttaacttattgtgcattggtaacagattgtagaacataagctgaaagataaaattcttgaccttaatgtctcatcttaaaaagaagcattggttgacattctatatctcgtattacttaaaaataatgggggagcgcagtatatattaaacaaagattggctttgtggtgatcattgttgaaggtggggtgatggctatgtgaaggttcactatatatactccctactgttgtataagtttgaaattgtgcataatagatttatttaaaacacaaagcatagaaatatctactataatattatggtgagagcaaaatttgagggggatgtacacctgcattttcgaagaatatatacatttcggagaccgaattcaaaatgaaaaaccgggctgctgtcccgcacggagcctctgggcgccgctgtcggccagtgcagagcaagcgctgacgccggggatccgtcagcctctggcctgggattccctgcgcagccaacaacagaaagaagaaaaccagctcccacacagagcctcccggctgcgcagacctttcccagcacagcggattgccagctccgagacccgggactcctcctgtcctgggccgaatgctcttttagcgcggtagagtgcactttctccaactggaaaagcggggacccagcgagaacccgagcgaacgatgggagggagctgcgcgcagaggcgccgggccggcccgcggcaggtgctatttcctttgctgctgcctttgttctaccccaccctgagtgagccgatccgctactcgattccggaggagctggccaagggctcggtggtggggaacctcgctaaggatctagggctcagtgtcctggatgtgtcggctcgcaagctgcgagtgagcgcggagaagctgcacttcagcgtagacgcggagagcggggacttacttgtgaagaaccgaatagaccgtgagcaaatatgcaaagagagaagaagatgtgagttgcaattggaagctgtggtggaaaatcctttaaatatttttcatgtcattgtggtgattgaggatgttaatgaccacgcccctcaatttgataaaaaggaaatacatttagaaattttcgaatctgcatccgctggtacacgactatcgcttgaccctgccacggatcctgatataaacataaactcaattaaagattataagataaactctaatccttatttttcattaatggttagagttaattccgatggtggcaaatacccagagttatctctggagaaactcctagaccgggaagaacagagatctcatagcttgatattgactgccttggacggaggggacccaccaagaagtgccaccgctcacatagaaatttctgtcaaggataccaatgataaccccccggttttcagcagagacgaatatagaattagtcttagtgaaaatctgccccctgggtcccctgtgttgcaagtgacagccactgaccaggatgagggggtcaatgctgagataaactactacttccgaagcactgcccagagcacaaaacatatgttctcattggatgagaaaacaggtatgattaagaataaccagtcatttgattttgaagatgtagaaaggtacaccatggaagtggaagcgaaggacggaggtggtctctctacccagtgtaaagtaatcatagaaatccttgatgaaaacgacaacagcccagaaataatcatcacttctctctctgatcagattttggagaattcacctccaggaatggttgttgccctcttcaaaacacgggatctggatttcggaggaaatggagaagtcaggtgtaatatagaaacagacattccattcaagatttattcttcttccaataactactacaaactggtgacagatggagccctggaccgagagcagacaccagaatacaatgtcaccatcgtagccactgacaggggcaagccgcctctttcttccagtagaagcatcaccttgtatgtcgctgacatcaacgacaacgccccagttttcgaccagacgtcctacgtggtccacgtggccgagaacaacccgccaggagcctccattgcgcaagtgagcgcctctgacccggatttggggctcaatggccacatctcctactctatagtggcgagtgacctagagcccctggcggtgtcgtcatacgtgtcagtgagcgcgcagagcggggtggtgttcgcgcagcgcgcctttgatcacgagcagctgcgcgccttcgcgctcacgctgcaggcccgcgaccacggctcgcccacgctcagcgccaacgtgagcctgcgcgtgttggtgggagaccgcaatgacaacgcaccgcgggtgctgtacccagctctgggtcctgacggctccgcgttcttcgatatggtacctcgctctgcagagcccggctacctagtgactaaggtggtagcggtggacgccgactcgggacacaacgcctggctgtcctaccacgtgctgcaggccagtgagcccggactcttcagcctggggctgcgcactggggaggtgcgcacggctcgagccttaggcgacagggacgcagcccgccagcgcctgctggtcgctgtgcgtgacggtggacagccgccactctctgccaccgccacgcttcatctggtcttcgcagacaacttgcaagagatactgccagacctcagcgaccgccctgtactctctgacccccaggctgaactgcagttttacctggtggtggccttggccttaatctcagtgctcttcctcctcgccgtgattctggccattgccttgcgcctgcgacgctctctcagccctgctacttgggactgcttccatcctggtctctgtgtcaagtctggacctgtagttccccccaactacagtgaggggactttgccttattcttataatctgtgcattgcacatacgggtacaaaagagtttaatttcctaaaatgcagtgtgcccctacattccaatgaagacatggtttgcagtgtttctcctggagccttaattccacctcatggtggggaggatttgacttcacatcctgagactctgacttcggtgagtttctcttttttgtgtgtgatttatctaatagtctactagtttctcatattttaggcatactactttattttcatatctagaatcatatgtttaaaatccatagctttttacaatattttctcaatgttttttcaattatagttttcactatgtatttggttcataagttgctctatctttttgtaaaataatgtcaccagactgaagatattttgtctttgtcttttttttttttttttttttttgagatggagtctcgcactgttgcctaggctggagtgcagtggcgtgatctctgctcactgcaacctccgccttctgggttcaagcgattctcctgcctcagcctcccaagtagctgggattactggtgcccctcaccacagctaaattttttgtatttttagtagacatggggtttcactatgtcgaccaggctgttcagaaactcctgtcctcgtgatcctcccaccttggcctctcaaagtgctgggattacaggcgtgagccacaatattttgtcaagttctgactatcgaacagaagcagtggtcttggcatctaagaaaacaaacaagtaacctatctattcaaatttgcgaagacttagtgaatttacgatatcttatttatatatttttaaagcctaaaaatattcagaagacaggcccagtggctcacacctataatcacagcactttgataggctgaatcggaaagtatcacttgagcccaagaattgagaccagcctgggcaatatagggagaccccccatctctactaaaacaacaacaacaaaaaaaaacattagcagagtgtggtagcattcccctgtggtcccagctacttgggaggctgagctgggtggattgcttggtcctgggaggtcaaggttgcagtgagccctgatcttgccactgcactccagcctgggcgacagagtgcgaccctgtctctaaaataaataaataaatatgcaggcagggccaagtgtgctgtaatcccagcactttgggaggtggaggtggagaatctcttgagcgcaggaatttgagaccagcctgggcaacacagggagactccatcgctacagaacatttaaaaattagcagggtgtggtggcacatgcctgtggtctcagctactctggtggctgtggtgggagaatcgcttgagcccaggaagtctaggctgcagtgagctgtctaggtgacagagtgagaccctgtctcaaaaaaaaaagacatttctaagaaataaatgaaatactattgcctttgcactcagtctctgtctctgattctctgatagaagatttttgaagaaaaaagataaaatctttgaagagttctatacttggaaggcatagtgacataaacacttctgaacatcctgttctctgtgtgaaagaagtgaacttctataccctttgcatttgagggaacaattgctactgggttgatgggcacacacagttgaagatatgtgaaccactggactttggcctctgatacaaactgcctaagagaagagattatttatactggtattaatgctctgatgaaaacaggtcatttgacataaacacttacttgttaaaaacctatatcactacatctaactttgttttctaaaacttttagtacttcaaattctacgtatttcttttctcattacaatgcaaacagtttaatttgcaactgtaatatatgttcattttagtttgtgattacctgcttaatcatttaaataggtccatttaacttgtatccctgtaagataaagtatgttttacacaaaaaggttaattaaggctcagtaaaactattctagaagagtactttaaaaacctcttacacaatcctaagctaaataagtttaatgaattaagtagttacaattataaagcttcagagtgaattatctcatgagtttatttaatataatctttgtatgaatgtatactaaataaaattggcctattcaaatcacaattttaaattataagacttttctgaatttacctagacactaatatgacctaaaataagtattatttaccttttattaaagtgtgtacatttctgttgggaaaacgtgttgcaaatatatatttaaccaaacattatcttgaaatatttacaatattttcactccactttatcacacctcccctaagaaacctacatatagtaaattatttaaagataggagtggagaaaccaaagaatctatgtaaaatataataatccaacagaatagtttactttccattgcatgtatcacttgggtgcagtaacttcttaggactctgagcgccgctgttcacctactaggagagaaaacgcagccagagctcaatccggattctcagggcttcaactacacaagccccacaaaccggctgctgggctgcagggaagctcactccagaatttaaagtgcccaggctacagagacaccctgaagccacagaaagacaaaggaaccggttgaaacacacaacgtgtccagtgaggactttgcagaattctgtaaccagactacaatggccgctcaaaggaatcgctcaaaggaatcaaaggattgcagcgggctggtcctgctctgccttttcttcgggattccatgggaggctggagcccggcagatctcctactcaattcctgaggaattagagaaaggctctttcgtgggcaacatctccaaggacttgggtctggcgccccgggagctggcggagcgcggagtccgcatagtctccagaggtaggacgcagcttttctctctgaacccgcgcagcggcagcttgatcaccgcgggcaggatagaccgggaggagctctgcgctcagagcgcgcggtgcgtggtgagttttaatatccttgtggaagacagggtgaaactttttgggatagaaatagaagtaactgatatcaatgacaatgctccaaaattccaagcagaaaatctagacgtaaaaattaatgaaaatgtcgctgcgggaatgcgttttcctctcccggaagctattgatccggatgtgggcgtgaactccctgcagagctatcagctcagccccaataagcacttctccctaagagttcagagccgtgccaatggcgtcaagtacccggagctggtactggagcactccctagatcgcgaggaagaggccattcaccacctggtcctcaccgcctccgacgggggtgaccctctccgatctggcactgtccttgtcagtgtgactgtcttcgatgcaaatgacaacgcgccggtcttcaccttgccagaataccgagtgagtgttcctgagaatttgcctgtgggcactcagctgctgacagtcacagccaccgacagggacgaaggtgccaatggagaagtgacatattcattccgaaaattacctgacacgcaattgttgaagttccaactaaacaaatatactggagaaataaaaatatcagaaaatctagattatgaagaaaccggtttctatgaaatagaaatacaagcagaagatggaggagcatatcttgcaactgcaaaagtgttgattacagtagaagatgtaaatgacaacagtccagagctgaccatcacgtctctatttagtccagtgactgaagattcacctctgggaacagtcgtagcccttttaaatgtgcatgatttagactctgagcagaatggacaggtaacctgttccattttggcgtatctaccatttaaattagaaaagtccattgacagttattacagattggtgatacacagagcccttgacagggaacaggtatcctcttacaatatcacagtgacagccacagatgggggaagtcctcctctatcaacggaagctcactttatgctacaagtggcagatatcaatgacaacccacctaccttctctcaagtctcctactttacctatatcccagagaacaacgccaggggtgcctccatcttctcagtgacagcgctggacccggacagcaaagagaatgcccagattatttactccctggctgaagacaccatccagggggtacctctgtcctcatacatatccatcaactcagacactggcgtcctgtatgcactcagatccttcgactatgagcagtttcatgagctacagatgcaggtgacagccagcgacagcggggatcctccactcagcagcaacgtgtcgttgagcctgtttgtgctggaccagaacgacaatgcgcccgagatcctgtaccccgccctccccacagacggttccacaggcgtggagctggcgccccgctccgcagagcccggctacctggtgaccaaggtggtggcggtggacagagactccggccagaacgcctggctgtcctaccgtctgctcaaggccagcgagccgggactcttcgcggtgggggagcacacgggcgaggtgcgcacggcgcgagccctgctggacagagacgcgctcaagcaaagcctcgtagtggccgtccaggaccacggccagccccctctctccgccactgtcacgctcaccgtggccgtggccgacagcatcccccaagtcctggcggacctcggcagcttcgagtctccagctaactctgaaacctcagacctcactctgtacctggtggtagcggtggccgcggtctcctgcgtcttcctggccttcgtcatcgtgctgctggcgcacaggctgcggcgctggcacaagtcacgcctgctgcaggcttcaggaggcggcttgacaggtgtgtccggctcgcactttgtgggcgtggacggggttcgggctttcctgcagacctattcccacgaggtctctctcaccgcggactcgcgaaagagtcacctgatcttcccccagcccaattatgcggacacgctcatcagccaggagagctgtgagaaaaacgatcctttgtctttgttagatgattcgaagtttcctatagaggataccccattggttccagtgagttttattttcatttttacttttgttaaaaaaaaaaagattggtttttactttgaagtttgcggcatgatggtggaaagtgtaaatgctaaaacactgatgagtagaatttgatgtttattaaggttttttttttttttttttttttttttttttttactttctggtaaaattcacctagtctcaatcaaggcctatatatcataaggctttgttatgattagctttgcagaaccttgtagtttatagtgttgttgagtacaatattgacaattcctaagacagacttccatacagaagtgcctgtcaatttatatttcctcctgggtggtcacatattgaaactccagccccttaagcaaccctcttgttctgaaggcaggtctggtaagaataggtaagtatcagaaagaaatcacctctggaaacacaacccaaatccaagaatactcaatgcagttcttcccaaggagaagggcaataggcctttttcaaactacattttatatatttttcaatctatactttgtggtgatagttgcagttgaatatactaagtttttcattaatattgaattaacaatttatttataacaatgtatgcttagatttttccagccctatttataactgataacactgcagtatcctttttgcatacaattctctaatttcacactgctatgtggaagatatagcattttaatttaactttcattgctcaatagggatcctgaggaggctatagagggtgaaattaagaatatttgggattctgcttttgtcttttttgttaaattttctagtgactaaggctgaaagtaaatatgggttgggaagacagataaatttgtacatgttcccgagaacaggagcaagagatatatgacaaagctatttcagtggctctttaatgtataaggaggcaaacacctgaaactctgaaaactctgaaattgagaggcaaaataaacttagagtcaagaaagaaatgccatttctgcagatcagaatataaacaccaaccacagctgtaaaaaagaaaagaatatatgcaacgaagggaaattatataaacaaaggatcattggaggtactgatgagttcatttagttcaatgaaaatagtgacgtattaggtagatctcttaattttattactagtattctactaaatgtggtagtataaagtcaaaaagcattccgaagtttctcaagacccttataattccatgatttttttcaggtcagtcaacatttgttgaatgataggtctgtggaaggaaagcacactctttagggtcatagttattaactattaaaccattgaaactattattttatatttgtgttaatgagagtcaaaattattgtgcattcatctcaaataattctattattttgaaaaatacaggttttttttttaaaaaaaactgctcttgacattgtagctattgtgagaaaatattttgattataattatttaaaagcaatacaggacaccctggatgatggtaatgactagggcaatggttgcattccagtacttaagtatgaaataaggaattattactttctgggtgaatataggctagaattgaagacaaaaaaatttgttgcttatcttcagtacttccagcttcatagataattactcttaaaaggaacaagaatgactgcctctggatggaggaattggatagcaatgggccgtgggataggagacctataaaccttcatgctatattattttgtgcctttttaaattttgaagaaaaaatattcatttattcaagatatatgtaaattcagtaaataaaaagatatgatagttatgaccaagtggaaatatatttcctgatgtaaaaggaatcactgaggaaaaagattaaaatattttggctgtcaactcgtagtttaaaaaaaattccttgaaagaggtagagaaaagtcaagttgcagtcccacacagagcctctgggcgccgccgtcggccagtgcagagcaagcgctgacgccggggatccctcagcctctagcctgggattccctgcgcagccaacaacagaaaagaaaaccagctcccacacagaggctcccggctgcgcagaccttgcccagcacaccagattgccagctccgagacccgggactcctcctgtcctgggccgaatgctcttttagcgcggtagagtgcactttctccaactggaaaagcggggacccagcgagaacccgagcgaacgatgggagggagctgcgcgcagaggcgccgggccggcccgcggcaggtactatttcctttgctgctgcctttgttctaccccacgctgtgtgagccgatccgctactcgattccggaggagctggccaagggctcggtggtggggaacctcgctaaggatctagggcttagtgtcctggatgtgtcggctcgcgagctgcgagtgagcgcggagaagctgcacttcagcgtagacgcgcagagcggggacttacttgtgaaggaccgaatagaccgtgagcaaatatgcaaagagagaagaagatgtgagttgcaattggaagctgtggtggaaaatcctttaaatatttttcatgtcattgtggtgattgaggatgttaatgaccacgcccctcaattccggaaagatgaaataaacttagaaatcagtgaatccgtcagcctggggatgggaacaattcttgagtctgcagaagatcctgatattagtatgaattcgctgagcaaataccaactaagtcctaacgagtatttctcattggtggagaaagacaatcctgatggtggcaaatatccagaattagtattgcagaagactctggaccgagaaacgcagagcgctcaccacttggtactgaccgccttagatggtggggaccctccccgaagcggtactgctcagataagaatcctggtaatagatgccaatgacaaccccccagtgttcagccaggacgtgtacagggttagccttcgggaagacgtgcctccaggcacctccatcctgagagtgaaggccactgaccaggacgagggcatcaactcagagatcacttattccttctttggtgtggctgacaaagctcagcacgtgttctctctggattacactacaggaaacattctaactcagcagcctttggattttgaagaagtagaaagatatacgataaacatagaagcaaaagaccgaggatctctctcaacacggtgtaaagtaattgtagaagttgtagacgaaaacgacaacagcccagaaataatcatcacgtcactctctgatcagattatggaggattcccctccaggagtggttgttgccctcttcaaaacacgggaccaagactcaggggaaaatggggaagtcaggtgtagcttaagtagaggtgttccatttaagattcattcttcttctaataattactacaagctagtaacagatgaggccctggatcgggagcagaccccagagtacaacgtcaccatcgcagccacagacaggggcaagcctccgttatcctccagcaaaaccataaccctgcacattactgacgtcaatgacaacgcgccggttttcggacagtcagcctacctggtccacgtgccagaaaacaaccagccgggtgcctccatagcgcaagtcagtgcctctgacccagacttcgggctcaacggccgtgtctcctactctctcattgccagcgacctggagtcacgaacgctgtcgtcctacgtgtccgtgagcgcgcagagcggggtggtgttcgcgcagcgcgccttcgaccacgagcagctgcgcaccttcgagctcacgctgcaggcccgcgaccagggctcgcccgcgctcagcgccaatgtgagcctgcgcgtgttggtgggcgaccgtaacgacaacgcaccgcgggtgctgtaccctgcgctgggtcccgacggctccgcgctcttcgacacagtgccgcgggccgcgcagccaggctacctggtgaccaaggtggtggccgtggacgcggactcggggcacaatgcctggctgtcctaccacgtggtgcaggccagtgagcccgggctcttcagcctggggctgcgaacaggcgaggtgcgcatggtgcgtgctttgggtgacaaggactcggtccgccagcgcctgctagtcgctgtaagagatggaggacagccacccctttcagccactgccacgctgcacctggtgttcgcagatagcttgcaagaggtactgccggatttcagcgaccatcccacaccctctgactcccaggctgagatgcagttttacctggtggtggccttggccttgatttctgtgctctttctcctcgcggtgattctagctattgctctacgcctgcgacagtctttcagccctactgcaggagactgctttgagtcagttctctgctccaagtccggacctgtgggtccccccaactacagtgagggaacgttgccctatgcctataatttttgtgtgcctggggatcaaatgaatccagaatttaattttttcacatctgttgatcattgtccagccacacaagataacctcaacaaagatagcatgctactggctagcattttaactcccagcgttgaagcagataagaagattcttaaacaggtaagtatttaaaaatgtatttaatcctttttatattacaatatgccaatatattccaatatagtggtattattttaagattctagataacttcttcatagagttcgcaaaatataggtcaaatttatggttatcattattaaaacaaaagtttaaattaaatgcctcagtcttcctactattcaaagacattttaaagcaaactacatgggtaatctccggtgacatttttatgaagtaaaatacctttcggttaaaaatataaaatacaggtatatttttacggcatggtattttaattgaaaccctgatgctactcaatttttctcaagtatttcatcttcatttactcaataaaggaaccttgtaagaattatagttaggcatcctacctgatgattttatcgggaccgtattatttccacttccagaaatgtcgttcctttcagtcggttaaaatcaattggaaccaactacaacctacaagttttcagctccagtaatattttgaaaactttttaaaaattaagcaagcccttttaataattactcctttcgcaggtgttcttggtaaagttttaacgtcacataatgtaagtattgtgtatcatcgtttttaagctctacaaatacgtgtgattcacaaaggtgagcgtaatcatttcttctggaatttcttagtcgttgcaataataagaatgggctctaggcgccgctgctcaccaatcagggaatgggaagctgcgcgccattgagtccctccctcccccgcctctaccacacaaagcggaatgagatggatactcacagatcctgacactggagacttagaagtattttccttcgctttctgatatattttggatgtagtcggcctaggacttcatagatacataagccgattcacaaccaaccagctcgagaaaccgcggaatatcggcttagagcctgccatggcgaatcggctacagcgcggggaccgcagtcggctgctgctgctgctgtgcattttcctggggacgctgcgggggttccgggccaggcagatccgatattcggtgccagaagagaccgaaaagggctccttcgtgggcaatatctccaaggacctggggctggagccccgggagctggcgaagcgcggagtccgcatcgtctccagagggaagacacagcttttcgctgtgaatccgcgaagcggcagcttgatcacggcaggcaggatagaccgggaggagctctgtgagacggtgtcctcctgttttttaaatatggaacttctcgtggaagacaccttgaagatttacggagtggaggtggaaataatagatattaatgataacgcccccagcttccaggaggacgaagtggagataaaagtcagtgagcacgcaattcctggggcgcgatttgctcttcctaatgctagggatccagatgtgggcgtgaactccctccagagctaccagctcagccctaataattacttttccttgcaactgcggggcagaacggatggggccaagaatccagagctagtactggagggaagcctggaccgagagaaagaggctgctcacctgctcctcctcacagctttagatggaggcgatcccatccgaaagggcgcagttcccattcgtgtggtggtcctcgatgtaaatgatcacatcccaatgtttacacagtccgtatatcgcgtgagtgttccagaaaacatcagctccggaactcgggtgctgatggttaatgcaacggatccagacgagggaatcaacggggaagtaatgtattcatttcggaacatggaaagcaaggcttctgaaatattccaattggattcacaaactggagaagttcaagtacgggggtctctggattttgaaaaatatagattctatgagatggaaattcaaggccaagatggtggaggtctctttaccaccacgacgatgttgatcactgttgtggatgtgaatgataacgctccagaaataactatcacctcttctattaattcaattctggaaaactctcctccaggtacagtgattgctcttctaaatgtgcaagatcaagattctggagaaaatggtcaagtctcctgttttattcctaaccacctgccttttaaattagaaaagacttatggaaattattacaaattgataacaagcagagtgctggacagggagttggtccagagctacaatataacgttgacagccacagaccagggaagcccgcctttgtctgcagaaactcatgtctggctgaatgtggcagatgacaacgataaccctcccgtttttcctcactcctcttactctgcctacattcccgaaaacaaccccaggggtgcctccatcttctcagtgaccgccctcgacccggacagcaaacagaatgccctggtcacttactctctgacggatgacactgtccagggggtgcctctgtcctcctatgtctctattaactccaacactggtgttctctatgccctacaatccttcgactatgagcagtttcgagacttagaactgagagtgatagcacgtgacagcggggacccgcccctcagcagcaacgtgtcgctgagcctgttcgtgctggaccagaacgacaatgcgcccgagatcctgtaccctgccctccccacagacggctccactggcgtggagctggcgccccgctctgcggaacctggctacctggtgaccaaggtggttgcggtggacaaagattcaggccagaacgcctggctgtcctatcgcctgcttaaggccagcgagccgggactcttcgcggtgggggagcacacgggcgaggtgcgtacagcgcgggcactgctggacagagacgcgctcaagcagagcctcgtggtggccgtccaggaccacggccagccccctctctcggccaccgtcacgctcaccgtggctgtggccgacagcatccccgaagtcctggcggacctcggcagcctcgagtctctggctaactctgaaacctcagacctctcgctgtacttggtggtggcggtggccgcagtctcctgcatcttcctggtctttgtcatcgtgctgctggcactcaggctgtggcgctggcataagtcacgcctgctgcaggcttctgaaggcgggttggcaggtatgcccacgtcacattttgtaggcgtggacggggtacaggctttcctgcaaacctattcccacgaggtctctctcattgcggactcgcagaagagtcacctgattttcccccagcccaactatggggacacgctcatcagccaggagagctgtgagaaaagcgagccactcttgatagctgaagactcagctatcattttaggcaaatgtgacccgacaagtaatcaggtgagatttatttctctgcctcctaattgttggtgtcttggcacaagtcttttaaggagatgttttttgagcctgttatgaaaactgtttggggggggggtggggcggcatatatttagttcatatatatttagagcaatacatgtgagttttactttgcctttcatgagattacgataatctttcagaacgtttttgtgaaagtcatttttcaatcttggcatattttcttttgatttcaaaggggccattcaactatgctggtttggtttgaagtaagttgaattttagtattatttttctattatcagtgtatgaggctctcaatttattatatatagatacaaattaatgattcacaaacactttttatttccatttcaattttgctgtgccttcactgatttgtagttatattccaccattatttgctattactgctaatgttcaaattttgatcctgttgatttaatagcatgctccctctagctctccttctcatctatctatctatacacatgcacacacacttatacacgtaagcttttctctgagcaattttattttgattcttggtggctggtaatatgcttagatcctgttgactatttcaactttgtctcatttcttcatcctatcaacacagacatattgactggcttttaactactggatttccttgggagataaaatttagatcacattttttcttaagctctagatgtcttttccattactatggtgaagttacattgactgttctgaggaaataattgaattattgaactggtattatttccttttattcttttactttggtgtctgtgtttgtatgtatggaaggttttttaatgtagtaaatccatatatagaaataacttgattttgattcagtgcttctcaaaaacctattttcaaatgtgctaaagatgtctacagatttattcaaatagagtagtttgtgaatatataaatagattgaaggtatttggactttaattaaactgatttagctagtatccttctggctatttttttgttcattttcagtgtagttgggagtcatagattccttctttctttctttataaggtcattcttatggcaaatagtacattcagttcttttattcagaccaacttgttattgaagcttgatagttgcctgacatacatgttatctgaagcaatgtctaggaaagccaaatgaggaaaggagacttatctagggtttttgatcacaggaatcatttccataatcaattcagtcaacactctcacatcacttctaggtatttgccccaaattacttggatatttatgttccctttcaagtttagttttctcatttaggaatttaccttatgtcattagttgtaaactgactatctagggctcggacaaaaataatttcaactgtaggaaaggcaagtcttccaacagatgcctacatttttcttgaagtcaagaaaaatgttcaggtattttgagcatctagggataggatttatacttgtggaattccaaactgagaaaaatgatgtaaggcattgtactttgactggaattagttaaataaaaaggatatgaggtatttggctgggaaaaggagattgttccatattataaaacctcatctaaactaacttcccaagatcgtggagaacaaaaaggaagggttggctttgaaatgtgatattaagagggttatgttgattcggaggtagtgataaagttctgttaaggtataacatatagtcccattaaatagaggataaaaataaaacaccatcacatttcatgttattaattcctatggcaacctactaggctatacctttatattctctttatgatgaaacatgaaacaataatccttttcagaaacctcttttataagtgataagaagggtttggctaactttattctgaatatgccctatatagctttcagtgctcctccagttttctctgataaaactaggaggaaaattatctgcacatcagattgaaaataatactgcatatcatttcatagtggtcaaaattttcccataccacttgatggggatgttttcccacaaggtttttgttctacaacaggagagaagactttgcctagttcttccaatatgtgcattgcttctgcttagaaaaaaacaaacttttaaattctctttgctgggttaatgactgttctatagattcccatctctaaggaatcttctttggtagtaaacactggaaaacagtcactacgaaaactcataaaatgtctagtttcctatacattagtccaacacatcagtctaattctgaatcccattgaattagcaaaggcttccggctgcagttttctaaatagactcagagccctgctgttggccaatgtgctgcaagaactggagcctgggatctaccaggacgatattctgttcagtcacagaagcaagtcggagagtggccaagacttgggctttctgctcctgcaaatctgattccatacggattggggtgccctcaaactgggagcattgagttttctatgtatggaagtaaatattttaaaagcactttgtgaaacattttctcttaacgtcggagactgcagcaacgcatgggaaggatgggaaacagggtgaagcagagaagcaggacccggcagtggcaagcactcttccctttcctgctgcctttgttctgcggggcaccctcggagcagatccgctactctattccagaagaaacggtccagggctccgtggtggggaaccttgcggaggacatgcggctgcatgttcaggatttattgacctgaaaccttagagttagtgcagagaaacaatactttaccgtgaacacggagaatgggaacatacttgtgagtgacagaatagatcgagagtcactgtcttcaaaatcctctgtgtcatacccttagagattgtagcagagaatcctctaaatgtttttcacataaatgtgatgatagaagatataaatgataacccacctcattttccccaaaatagcattgttttacaaatcaatgaactagcaattccaggcattcggtttggcctggaatctgctatagatgcagatgtagggcctcactctctccagagttaccagctcagttctaatgaacatttctctctgatgatggacaagactaaaggcaagaacgctccagaattagtgctggagaagcccctgggccaggagcaacagagctctcatctcctggtcctggaagcaatggacatgggtgacccagtcccaactggcactgctgcaattcaaattgaggtcactgatgccaacgataatgccccagtttttagccaggatgtatacaaagtcagccttagagagaatgtgcccccaggcacctctgtactaaaggtgacagccactgaccaggatgagggtgtcaatgcggagatcacctactctttcaaatccctacgagatgatattggaaatatgtttgtgctagaccatcaaaatggggaaattaaatccaaagacttaatagacttcgaatttcgtagcagttataccatgagagtagaagctaaggatggtggaggcatgaccagcgaatgtaaaattatactagaaatcctagatgagaatgacaatgccccagacgtggtttttacttcagtgtccagttctgtaactgaggacgcagaaccctggacggtgatcactctgttcaaaacacatgataaagattcgagagaaaatggggaggttacatgcctcataaacgaaagagttccttttagaatcgaatcttccgccaataatgactataagcttgtaacagatgggaccctggattgggagcggatcccggagtacaacgtcaccatcactgccactgacaagggcaagcctccgctctcatccagcacaagcctcaccctacgcattggtgaagtcaacgacaatgctccggttttccaccaagtctcctacgtggtccacgtggccgaaaacaaccttcccggagcctccatcccacaagtcagcgcctctgacctggacctagggctgaatggccaagtctcctactccatcgttaccactgacttggagctgcgggcactgtcgtcctacgtgtccgtgagcgcacagagcggggtggtggtcgcgcagcgtgccttcgaccacgagcagctgtgcgccttcgagctcacgatgcaggcccacgaccagggctcgcccgcgctcagcgccaacatgagccggcgcatgttggtgggcgacctcaatgacaatgtgccgcgggtgctgtaccccgcgctggggcccgatggctccgcactcttcgatatagtgccacgcgccgcagagtccggctacctggtgaccaaggtggtggcggtggacgcagattcgggacacaacgcttggctgtcctaccacgtgctgcaggccatcgagcccgggcttttcagcctggggctgcacacgggaacctgctggttgctgtgcgtgacggaggacagccgccgctctctgcgccgctacgcttcacctagtcttcgcagacagcctgcaggaggcactgccagacttcagtgacagtcctgtgccctctgattcccaagcaaagctgcagatttacctggtcgtggccttggccttgatttctatgctcttcttcctcgcagtgattttggcggtcgccttgcacctgcgatgctcttccagcccctctgcctggggttgctttcaccctggtctctgttctaagactagaccaggggtttttcccaactacaatgagggaactttgctttattcctgcaatctgtatgttccctcggattctagaaaaagaagatttaattttctcaccatgacaccagaaacagtccccccacaagatctttctaatgaagtttctctggtagcaagcttcactgaagagaataacaagataagctctaactctgttgctcctactcacgtgagttccaatgaatgtctttcatttacaaatggatgaggtttaattttcaaaccaatattttggcaagaaaatcttaaacatattatatctactattgcttcaggtttgtttgcccactcttaatatttcctgttcctttctgtgtgggccagtaacttcattattagctttcatgtatttttgaaacattttcaccatttttacgggagactttttttttttttggacggagtctcgctctgtggtccaggctggagtgcagtggcatgatctcggctcactgcaagctctgccttccgggttctggccattctcccgcctcagcctcccgggtagctgggactacaggcgcccgccaccacgcccggctaattttttgcatttttagtacagacggggtttcaccgtgttagccaggatggtctcgatttcctgacctcgtgatctgcccgcctcggcctcccaaagtgctgggattataggcgtgagccactgcacccggcccggagacattgtttatacacacacacacacacacacacacacacacacacacgtgtgaaaagtgggtattatgatactgctgtcattgagatattttaattgaggaataaatttttttcctgtgatgtttcttgggacatcaatatttgagtatataaggctttttctttaatccattaactataaattttgaagaaaatgcatgagaaaatggagaaaatgtgttttttttttaaaaaaaattgagattaaggtctcattatgttgcccaggctggactcaaactcttgggctacagtaatcctcccacctcaatctccagagtagctgagactacagttgcctgaaactgtgcctggcagagaaaaaagcttaaaaaaataagaacatggtaatgatttgataatattcagttacatttacttttgattcttgtaattcaagtaaactcaattttatgtctgatattttctcacagctacctatatatttcttcccaatttaaaatatattattttattttatgcctagcaaatatctttacagtataaatatttacgctcatgaaagtacgtagccagttatttcttagggagaattttttccctatattttgatgggcttccaaaagtattaccagtaattctcagtaattacaattaggtcagttacccaggaaaaggtaagtctgtaacattctttggactaccaattttcttttactaagtttcctgaacaataaatatttttgaaatataatgtattaatagaattctggagtacttccattatttccagtcaatgcaagttggaatgcttctactttatgctaaaaatattaatgtttctttttcacttgggttcttgttaagtgtgattctgataatgtatacaatcacatatcatttttaggtttccataatatcatgaaaatttgatttttaagcgttacatgtcaacaacctggtaaagtaatccttccattcaggatcattcaaggaatctatttaaaaatattttccccaaattatagctgaatcagaaagtttaaattattatattatatgatttgtcaaaaagagaaactcctagggagacatctccataataggtgtgttgggggaacagtaatctcaaagcagatgcactaacattataagattaaaatcattgtttatagaaacttccaattcatttaaaagctcattggggaaaaaaaagctcattgggaaaaaaaaaaaaagctcactaaagtttctattaaagcgaatacggtagatttccatccccttttgaagaacagtaggtggagctatttaagatataaaaacgaaatatcctttctgggagttcaagattgtgcagtaattggttaggactctgagcgccgctgttcaccaatcggggagagaaaagcggagatcctgctcgccttgcacgcgcctgaagcacaaagcagatagctaggaatgaaccatccctgggagtatgtggaaacaacggaggagctctgacttcccaactgtcccattctatgggcgaaggaactgctcctgacttcagtggttaagggcagaattgaaaataattctggaggaagataagaatgattcctgcgcgactgcaccgggactacaaagggcttgtcctgctgggaatcctcctggggactctgtgggagaccggatgcacccagatacgctattcagttccggaagagctggagaaaggctctagggtgggcgacatctccagggacctggggctggagccccgggagctcgcggagcgcggagtccgcatcatccccagaggtaggacgcagcttttcgccctgaatccgcgcagcggcagcttggtcacggcgggcaggatagaccgggaggagctctgtatgggggccatcaagtgtcaattaaatctagacattctgatggaggataaagtgaaaatatatggagtagaagtagaagtaagggacattaacgacaatgcgccttactttcgtgaaagtgaattagaaataaaaattagtgaaaatgcagccactgagatgcggttccctctaccccacgcctgggatccggatatcgggaagaactctctgcagagctacgagctcagcccgaacactcacttctccctcatcgtgcaaaatggagccgacggtagtaagtaccccgaattggtgctgaaacgcgccctggaccgcgaagaaaaggctgctcaccacctggtccttacggcctccgacgggggcgacccggtgcgcacaggcaccgcgcgcatccgcgtgatggttctggatgcgaacgacaacgcaccagcgtttgctcagcccgagtaccgcgcgagcgttccggagaatctggccttgggcacgcagctgcttgtagtcaacgctaccgaccctgacgaaggagtcaatgcggaagtgaggtattccttccggtatgtggacgacaaggcggcccaagttttcaaactagattgtaattcagggacaatatcaacaataggggagttggaccacgaggagtcaggattctaccagatggaagtgcaagcaatggataatgcaggatattctgcgcgagccaaagtcctgatcactgttctggacgtgaacgacaatgccccagaagtggtcctcacctctctcgccagctcggttcccgaaaactctcccagagggacattaattgcccttttaaatgtaaatgaccaagattctgaggaaaacggacaggtgatctgtttcatccaaggaaatctgccctttaaattagaaaaatcttacggaaattactatagtttagtcacagacatagtcttggatagggaacaggttcctagctacaacatcacagtgaccgccactgaccggggaaccccgcccctatccacggaaactcatatctcgctgaacgtggcagacaccaacgacaacccgccggtcttccctcaggcctcctattccgcttatatcccagagaacaatcccagaggagtttccctcgtctctgtgaccgcccacgaccccgactgtgaagagaacgcccagatcacttattccctggctgagaacaccatccaaggggcaagcctatcgtcctacgtgtccatcaactccgacactggggtactgtatgcgctgagctccttcgactacgagcagttccgagacttgcaagtgaaagtgatggcgcgggacaacgggcacccgcccctcagcagcaacgtgtcgttgagcctgttcgtgctggaccagaacgacaatgcgcccgagatcctgtaccccgccctccccacggacggttccactggcgtggagctggctccccgctccgcagagcccggctacctggtgaccaaggtggtggcggtggacagagactccggccagaacgcctggctgtcctaccgtctgctcaaggccagcgagccgggactcttctcggtgggtctgcacacgggcgaggtgcgcacggcgcgagccctgctggacagagacgcgctcaagcagagcctcgtagtggccgtccaggaccacggccagccccctctctccgccactgtcacgctcaccgtggccgtggccgacagcatcccccaagtcctggcggacctcggcagcctcgagtctccagctaactctgaaacctcagacctcactctgtacctggtggtagcggtggccgcggtctcctgcgtcttcctggccttcgtcatcttgctgctggcgctcaggctgcggcgctggcacaagtcacgcctgctgcaggcttcaggaggcggcttgacaggagcgccggcgtcgcactttgtgggcgtggacggggtgcaggctttcctgcagacctattcccacgaggtttccctcaccacggactcgcggaagagtcacctgatcttcccccagcccaactatgcagacatgctcgtcagccaggagagctttgaaaaaagcgagccccttttgctgtcaggtgattcggtattttctaaagacagtcatgggttaattgaggtgagtttatatcaaatcttctttcttttttttttttaattgctctgtctcccaagctggaatgcagcggtacgatcatagctcactgcagcctcaaactcctaggctcaagcaattatcccacctttgcctccggtgtaacagggactacaggtgcaagccacctactgtctgcctatctatctatctatctatctatctatctatctatctatctatctattactttcttgtacagacaggagtctcactatgttgagcaggctgatctgaaacttgggctcaggctagcctcctgcttctccctcccaaactgctgggattacaggcgtgaaccacagtgccccgcccttatcagatattcttttctggctgggcgcggtggctcacgcctgtaatcccagtactttgggaggccgaggcgggtggatcacctgaggttgggagtttgagaccagcctgaccaacatggagaaaccccgtctatactaaaaaaatacaaaattagccgggcgtggtggtgcatgtctgtaatcccagctacttgggaggctgagtcaggagaattgctttaacctgggaggtggaggttgcaatgagctgagattgtgccattgcactccagcctgggcaacaagagtgaaactctatctcaaaaaaaaaaaaaaaaaactttatcctctagtttcatccattgatgacacttgctttaatcacttattacaatcacctccaaatgaagattttataattccattgtttcttctacagttgttaattggctttctaccttgaagaagagttttatattctctatatatgtttgtttctatgattctggaagcatggttttctattttattcaatggcctgtaatctgttaatatcaattatttattttgatgctgaaattgtcccaggattggcctttgggactccctttaggctgatttctatgtcctttctgttacagcaagcttgggattatatccaagatttgtaattccaatgtacttacttctgtcagtgtaaacaaagtacgatttctggactagatgacttgggcattgtgggggaggtggaaattagaggtattctctgtttttcctgtaggatcttgcatttcttcctcttgctgcttgtctctttgtgtcgggaacaggccccccaaaatctggccataaactggccccaaaactggccataaacaaaatctctgcagcactgtgacatgttcatgatggccgtaatgcccatgctggaaggtagtgggtttaccggaatgagggcaaggaacacctggcccgcccagggcagaaaactgcttaaaggtgttcttaaaccacaaacaatagcatgagtgatctgtgccttaaggacatgcccctgctgcagataactacctcaatccatccctttatttccgcccatctcttcgtttcccataagggatacttttagttaatctaatatctatagaaatgatgctaatgactggcttgctgttaataaatatgtgggtaaatctctgttcagggctctcagctctgaaggctatgagacccctgattccccacttcacacttctaaaaaaaaaaaaatttttttttctgagcttggagaaatatatcccttagtacacttggcatttataaagcagacatcaataaatttatatatatgtgacagataccaacaacaatccagtccccttccctcataccttatttatgtacatatattttatataatagatataatttattaacaatttataaaattactttgttaatactctatatcattttctagctgaatttatcaatgataatgctcttttcccacttttatttttttcccattgaccatgcagcagttttgtgtagaccgtctgataacaactgatctgtttatctaggggggagaaatctaattcaatggaaaatataaataaaattgtgataaacttttgtaaatagagtggcttttaactacacttgagatggctagcaaattcataaagtgaatttactttctttcaaagttcagtaattctttctggccattagggatatgtccatttatactttctcagtatcccaagtcatttcatggttttaaatcattcatgaacttccaaatatagtgaatttatttcttctgcatttaaaattttatcacttaaatatacaatataccgtattgccatgacgaaaaatggtaaagactatttttcacttctgttatgcatttcattaatacgatatctgtatgtgtttccaagttagacatttcttttgcccatttcctacactaatgatactaatgatgactttgtggaatattcagaattaacaaaatgtgttttgagtgctttttttagtactggggcaaatttgcagtaatatcgcctgctttttacattaaattccccataacttttacaactatgggaaaatttctgaaacgtgcacagattccaagtgttttctgagaactttatgcttattgtagagtggttacagacactgaatgctaaagtgtattactctttgaaaagcattgcttgatttcttttggtgaattctgtaaaggtgcagggaaacataacgtcccaattattttttctttcttctttgtttgctgcctatctactttgaaagatacaatagttaaaacccagaaaagagattggaaaccccttagagaatgaaagacatccaagggctctaaaatgcggcagttgctgcttctgagaccaaaaaagggggcaaaatatagagtgtgtggttctacttgtgtgattttttgaaagaaagtatttgaatttatctaaaaatactaaatttgtatttacattagttttcaaatagaatttaataagtacagtgttctataggtaatattgagagaaatagaggacaatgaaacctctctcctccatcatcttgtatgaactaccaaaatgtttatcatatggacagttctcatatatagtcaaatagaaagaaagacataataggaaaacaaatgacttgggaaactaagctaacatggtctaattattctgacctctgctcacctaacttgatttaggaacaaatcattgagagttagagcatgaatagtcaagactgttagaccatatctcaaatatcagtgacttcaatcaactatgtttccagtttaagctgaataggctttattaaatagttgttgaatgaatggataaacaaataatgtactctggggattacctgataccaggattctgaattttcagatgtatcatagaaggatagcagctttgcaattaggtaaattgttaactgtgtcacctttagcaagttatttaatctctttgagcttcagcaaagtaggaataatcatatctaatttgaaaggtcgtggtgatggctagggctaacaaaaatctgattcacaacatgcaattaattaacagtagccatttttagtggttgaccaaaaaaaggatttatattttcaatgccagcacactcgatgttctgttgggaaaaataataatgatttttgtgtgcttctccatatggtataatggaatgatttgtggatggaaataaaactgttctaaaatttttgtgacagctggtttaaaaatcttaagtgcctaggcacattcttgattgagaagccacagttttaggccataaaagatgggggaaagatttttatatgagacaattttgtgagtgttactttttctttgtctgaaccatagtgaaatctaaacaaggatcttgtgaaacttattttaaagaagcagtttacttcaatgggatcttagataatttcaccagaaaatggatcaccgaaaccagaaggctggtgatcattatttggtttgggccatataagaattgaaactaacggcttagctttaggatttttaggacacttgttgataatttaggattcataattaacatatgtgttgattgttttctgagactaactgggcaatgggtttggatgtgtttacatttattctgattccagtcataaaattatgtcaaggactttccttgtctttttatgtgtatgacagatgtgtatgtatccatttcatctaacaagttaaagcgttcagctataatttaaaatttgtagcttcactgttttatagtacctaaaattggaatgtaatcagtcagaagacattcatccactgctttcattccagaagtattatgctttttgaagcagcaatagcataggaatgttgaggagactatactatacttttatagcatatttaatctcgtagatcacttttcaatgaattataaggctgatgacaaatgagcaaattgtatcagttttctttatgacatgtaacagagtatagctgtgatcatgaattggatagttctggtgtaaaaatctgctttatccccatataagatgtcaggttcagaaaagcaaacacatagtttcgaagagatgttgatcaaactgatgaggctaaatctcaagaaagagacacagttaccctctaatgttacactttgagttcacctttttttttttttttgagacagagtctcaatctgtcgccaagctggagtgcagtggcactatcttggctcactgcaacctctgcctcctgggttcatgctattctcctgccttagcctcccgagtagctgggactacaggcacacgccaccacacccagctaatttttgtatttttagtagagatggggtttcaccatattggccagaatggtcttgatctcttgatcttgggatgcacccaccccacctcagcctcccaaatagctgagattacaggtgtgagccaccatgcccgaccactttgagttcacttttaagaaaccatacttaatggaaaattaccagtaacagggcatactgtttaggatgcattcctaaaatattaatggcaaaagatagccagcctatggcaaagctaattggaaaaaatattttataaaggatgagacttctggataccatatgggaagggctctggttcaggaaaatgtttttaaaaaactgtcattgaagagaccatagaatcaaacaaaataatttaatctgtatgtaaaagaagttggtaccaccataatttttcttatacatgtcatataaggatctactctgtgtattgtcattgagggcagatataatttcttagttcatcattaactctctgaagtatttcacacagtagtttgtacaccttctaagtactcaatacaatgcttgagttcaattattggaaagtggtctcttggagaaaaaagaatcatagtgcaaaaccaattattttacatggacttttcctctatatctaagccctaataagaggcagctgtctgatatacatacatacatacatacatatatatatatatatatatatatatatatatatatatatatatacacacacacacacacatatatgtatatatatatttggagtaggggatggagtcttgctctgtcacccaggctggagtgcaagtggtgtgatctcagctcactgcaacctctgcctcctgggttcaagcgattctcctgcctcagcctctccagtagctgggattacaggcgcctgtcaccatgcccagctaattttttaaaatatttttagtagagacagagtttcatcaagttggccaggctgctcttgaactcctgacctcaggtgatccacctgccttggcctcccaaagtgctgggattataggcatgagccaccgcaccctgccaactgtctgacttatcttaaaaggctaaggacctggtttgtttgtcaaattttgaaaatagatgcctcagttcataagatttccatattgtgtggcaggcgcctgtaatcccagctactcaggaggctgaggcaagagaatcacttgaacccgggagacagaggttgcagtgagctgagatcacgccactgcactccagcctgggcgacatagtgagactctgacaaaaaaaaaaaaaaatccatatgtgaaaattcttagaagcttcctatacaatttcagctgaagattcagccaacagttcattctgagactgtgttccatggaaaaagtaaagcccaggcatggaagtgggaatggaaagaaagattctaagcctacaaatactcaaacatcaagaagaaataaaaataagtcatcacttcgacttcatgtgctaacatcactgaggttataaattcccaggaatattttattgcgggagcaagactgcactgctgcctttcagcttgcaaattccagtgagaaacgtctttctctctgctctcaactaactctacagaacgctgtcctctcatttcttcaggctgcagttctagagtagggactcagagtgccactgttggccagtctggaaacagagataaatgagccaatccccagacattccggcttggtggcttttctaatttcatggaatgcaaatccaagagcagacccacaacattcctattatggctcctagttctacaaattataagcaggaacggaacggatttacaggcaatgagttcagctccttcttggctggagattctataatccaagaagagtttgaaaaggggcttatttgggctggagcagcagcaactctaactgtggaaaaggtggggaatggtgctggactgacagtctgggtagaaccaaggcgactactgcctcctttcctgctatttctatcctgctgggcattctctatgatgcagatccgttattcagtcctagaggagctggccaagagtttggtggtgggaaaccttgccaaggatctgggactcagtgtcgaggacatgcccacttgaaagcttcgggttaatgctgaggaataatacttcattctaagtggggaaagtggagacttacttgtgaatgactgaatggatcaggagcagatacgccccccaattatagcttgggccataacgctttgaaatagttgaaggccaggcatggtggctcacacctgtaatcccagcactttgggaggccgaggcgagcagattacgaggtcaggagttcgagaccagcctgaccaacatagtgaaaccctgtctctactaaaaatacaaaaattactgggcatggtggtgcaggcctataatcctagctactcggggggccgaggcaggagaatcgcttgaacccgagaggcaatcgcaccactgcactccagcctgggtgacagagcaaggcgccatctcaaaaaaaatgaacaaacggtagttgaaaattctttaaatgtttttcacattaatatggagattcaggatatgaagaatcatgcaccacggttcagcaggaatgttattaagttacgtatctctgagtttacccagctggaacaagatttgcaacagaacctgcagaagatcctgatgttgagagaaattccttacaaaattatcaccttagcagcaactctatatttctctttgaagtaaaagtgaccaacagtggaaagacatatgttgatcctgtgttagagaagctgcttgactaggaaaagcagagctcccatcccttagtgctagcagccttagacggccccccaacaaagcagcatcactcaactcctgatcctattggttgaagccaatgacaaccctgtgttcatctaggatgtgtacagcgtcggccttcaggaagatgtgcatccgggcactcctgtgctgagagtgagggccaccaaccaggactagagtgtcaaggcagagatcacatatggcttcacaacccagagtacccatatctagtttggccttgatcaaatagtggagaaatgaaaactttaagtacattggacttttaaagatttttaatttccatggttttggtagcaagtgacagagagggactcattgtccagtgtacagttgagaccgaatttctagaagataatgacaatatcctagaggcgatttttacttctaattccacaatgattcccaaagattctgcaccttggacagtaatcactgtccaggatttaaatcacaagatctttaaatcacaagatctggattcgggagaaaacgaggtcacatgtctgatataagaaaatgcaccttgagaaaaatcttcctccaataattaactacatgcttgtaacaaatggggccgtggaccaggaacagacccaaggtataacatcagcatcactgccactgacagaggcaaaccaaccctctcgtccagcccaagcatcaccctactcattggcgatgccaacgacaatgctctggttttctaccaggcctcctacgtcgtccacgtggccaagaacaatcttcccaaagcctccatagtgtgcaagtagacacctccaacctagacttgggacccaacagccaagttccctattccatcgtggccagtgacctggagccacaggcgctgtgattctaggtgtccttgagcgcacagtgcgccttcgaccaagagcagccgcgagccttcaagctcacgctgcaggcccgcgaccaggactagctcgcgctcggcgtcaacgtgagcctgcgcgtgttggtggacgacctgaatgacaacgcaccgcgggtgctgtaccccagctctggagcgcaatggcttcgcgctcttggatatggtgctgcacgccgcggagcctggctacctggtcaccaaggtggtggctgtagacgcagatgtgagacacaatgcgtggctgtcctaccacgtgctgcaggccagcaagcccaggctcttcagcctggaatgcgcaccgacgaggtgctgacagctcgcacgatgggccacaggaaagcgactcgccagcgcctactggtcgcggtgcactgcggtggacagccgctcctctcgctaccgccacgtcaccaccactaccgcccctcgtcgccgacagcctgcaggagactctgccagacctcagcgatcactctgcaaagctacagcctgaatccaaaattaatttatatctggtgattgccttagctttaatttcctttttattcttcctgattgcattgtttgtgctggttttaaagtgccgaagaccccaaaatgatcctgtctgagtctttcccacggatgtctatcccgcgctaagccccaggtttctgggtaactgtagctctatgatgccatattcctaccaggtgtgtgcttctcctacgaatccagggctgagtgaacttcttttttgaatccctacccctcaggactcaatagcagtttcactgcagaaagccccttggggaaggggatgattgtgattattctaattgcttgggcagaatccactctccaaggtgaaaaattcttgatgaaactaagttcagtcacaagcaggttttcttctagcattaaatattttcagagatctcagtaaaaagcatttctagcagcaagaccaaaggcctaagatgagaaatatttggcatggtgagcttgagggacagtagtcaggcagacaagagtatcagacatgccagagcatttggggcctgtaggtaaggagcatgttttgattatatatatttgtatgtgtttgattatattttataattttactttgatattcaaattgtactgatccaaaaataagggagggacaaatcttggccattgtagtatgagagatgtaaatttacaactcagaatccctgcttatcacttctccttcagcacacaactgtttcattttctatttaagaaacttcctctcactgcaaaaagacattctggctgataaagttagcctataatttcagtaaatctaagaatatgactaatggaagttgccagacctaaactttgaaaattattgttccactgaagagcgtcttatgactgagtgttccagtctccttctcaagctgaaccttgcttttcaaaccagattaagaacactatcataagttatactgcattttatttccctacccatgtccactgcatcattctctatagtacaaagagcttgtctcgccaggcgcatctataatcttagcactttggggcgccaaggcgggtggatcacttgagcccaggagtttgagaccagcctggacagcatggcaaaaacccatctctacaaaaaaaaaaaacaaaaattaacaaggtttagtggtccatgcctgtggtctcagctacttgggaggctgaggtgtgaggatcacctgagtctggggagattgaagctgcagtgagctgtggttgcgctcctgtactccagtctgggtgacagaattagaccctgtcccaaaacaaacaaacaaataaagagcttctctccttatgacttatttaaagcttgggaaattgttccaattcaaatgctttaaatggacttgagctaaaacagaatgtggtatatgaaatgttcttataatcaggtgattgtaaaaattgatccagataatgttagcatagcattttactgaactagtagtttacaaacacttcaaaaattatagaataacatttgcatataaaattcctcatacatttccctatcagtgaattggaagcttacaatatacaatattaccaaaaagacaaaaaaaatgaaaaggaaacagttacctttggaaaacataattaggtaaaatgggtaatatggaaagtctgaaaactgaaaaaattactgataagtcaagagaaaaggaatattagtaggaaaattcataaaagtgtgtctgactactcacagcaggtttccttattggtatgtattctgtggtccatctaagctatgttaattttattttaaatgctacctgggtattggcttctaaaaggaattcagtaaatcagataatttggcatcttcaatctagattctgatgctcacctgaaaagtctgctaaggattggaaaccaagaaaagtgaagtatctcaacagatatgtgtcacttgtgtgtactggattttttttttttttttttttttttttttttttttttgagatggagtttcactcttgttgcccaggctggagtgcaatggcatgctctcggctcactgcaacctccgcctcccaggttcaagtgattctcctgcctcagcctccctagtagctaggattacaggcatgtgccaccacgcccagctaattttgtatttttagtagagacggggtttctccatgttggtcaggctagtcttgaactcccaacctcaggtgatcttccctccttggcctcccaaagtgctgggattacaggcatgagtcactgcgcccggtcgcgtactggatttatattgtgtaatactttgctctagcagtatagtaggtgagacagtgactgtgtctagtgagcaaaaggcacttatttgacacttttgactcttcctttctacttaccttatttaaaattgatttttgcatgtggcatgatgcaccagttcattgaggtaggggttgaagttatttcccatttttttcaataccatttattaaaaatattttcctctttctgttgaatttgcttggtgcctttgttgaaagtcatttcactgatatatgtagttctatttctatattcttgatcatgtttcatttgtctattcttttactaatagcacactgtctcaattattgtagctttatagtaagtcttgctacaaagtcttactacaggacaaagcttgtaggatttttgaatgggatggcattgcatctatacctttatcagggaaagagggaaggagggaggaggatcatcttaacaatattgacacttcaaatccatgaacatggtatatatttccatttaattaggtctttaatttctctcagctatgttgtatagttttcagtgtagagaggtcatgtatatttctcattaaattgtccctacatatttgatgttttctaatgttattgtaaatagtatttttaaaattgtatcttctaattgttcatttctagtttacagaaaaatgaaaaactatgtttttatgtattctatatgcttttgaaaagtaagaggtgcaaagtgctctattcttacactatattgtgtgagaatataagtcgaaaccactctgcataagttcaggcttccattctcttcagtttgtaggttgagagaacccatccagaaacagtaaacattggtgtctgcccaagtctggtcctgggtggttcattcattcatttacataacaaatatttattaactgtctgctatatgcaaggcactgacctatggactaaggatgcagcaatgaacaaggcatatatgattcctgagttaatgggccctattctaatacatgatattttacaggtctgataaaagccaacaaggagaaatacaaaagcactaagagaaagcttatagtagggaagcttcgcctaatctgaaggtcaaggaaggctttctttttttcggaaagtgatatttagagagatgaatagattaataggatgagtagaagttatctaggtaacaaggaaagtaaaaaagaaattgtcaggcagaggaaatagcatgtgtaaagatctttttaaaaaataaaaggtgtgactcaagcaatttaaaagggctagggaggctagaaacagaaaataaatagatgaaactaataaggcagggagagccttgtaaatcacacttaaaattctggattttgttctaaatacccttgtacttaggagctattaaaatattttaaacaaggcagtgacaagatatttgaattattaagcttactctggctgctatatggagaattgatttatgagggttataaatagaaataggaagataagataggagactatggcaatattcctggtaagaaatggaagaagagctggcttggattaaaggggaggcagtggatgtagaaataaatggatgaattatagatatatttaggaaatgggttcaataagacttaataatggaataggtggaatataaatttcatgagggcagggggtgttttgtttattattatattcctaggtgtctgaaaatattgttgtgttgcctggcaagtggtagatcttcagtgaaatattattaactgaataaatacaatggataaatggggagcagggattaagagtgattcctgggtttccacattaaggaactggatggacaaagctaccatttgatgagaatggaagactaaagaatgatagatttaagagaaatcgagttgagttccagccatgttcatttgaaggatctgagaaacagtgcagatattcagtgtgtgattagacatatggtcatcattcttttttttttttgagatggagtctcgctctgtcacccaggctggagtgcagtggccctatctctgctcactgcaatctctgcctcccaggttcaagtgattcttctgcctcagcctcctgagtagctgggactacaggcgtgcaccaccacgcctggctaatttttgtatttttagtacaagacagcatttcaccatattggccaggctggtctcgaactctgatctgcccgcctcggcctcccaaagtgtggggattacaggcgtgagccaccgcgcccagccggttaccattcttttactctgagttcttccattgtgatcatctagtcagatgggtagatccttataaggctgagcataataagcttcctgatagctctacactggtatgttttggggttcatggctgagctacttttgtgttttatttatcttcctgatctctttttcactgtaagaaacatccagcacccagggaaatttgctgtctaattcatactccactcttcagactagtcctagtgttcagttttgttttgttttttttctgtgtctggaattctattaaaatgtgtcaggctgttttaatttttgttgtttaattttctttcacatgattatatgtgctccatggatttttttgtttgtttgttttttgtttttgtttttgtttaagcggggtcttgctcttgtcgcgcaggctggagtgcaatggcttgatctcggctcactgcaacctccgcctcccgggttcaagtgattcttctgtctcagcctcccaagtagctgggactacaggcacatgccaccacacccggctaatttttgtatttttagtagagacgggtttcatcatattggtcaggctggtctcaaactcctgaccctggtgatctgcccacctcggcctcccaaagtgctgggattacaggcgtgagccaccgcacccggaggaaatttttaacctcagtttttcttcaccatctgtaaaactgcatagaaggaatgtttaggataaaagatgcataacaatcataacaaaattgttgggttttaatgttatgagtacacttggaggattctatgtccacacataccttaaacatcctatagagtccttagcattttaaagttgaaaccaacagtatgaatgatggtagaattttcccccccaggaagttagaactgttccatatcttgatagagggatgggttataaggatgtacacattttccaaaactcattgaacttaagagtcttgcatgtgactgtatataaattatactttaattgaaaataaatttaagaaaataaaattggctgggcgtggtggctcacgcctgtaatcccagtgctttgggaggccgaggtgggtgaatcatctgaggtcaggagttcgagaccagcctggccaacatggtgaaactctgtctccactaaaaatacaaaaattagctgggcatggtggcggacacctataatcccagctactcgggaggctgaggcatgagaatcgcttgaacccaggaggtggaggttgcagtgagccaagatcatgccattgctctccagcctgggcaacatgaacgaaatgccatcttaaaaaaaaaaaattaaaagaaaagaaaattagcctcccccaccctcactatacctcagactcacccctgaaagatcactactattcatccctggttatgtacacttacaaacattttctgtgtgtatgcgaatgtatgtgtggggttttctttgcacaacaggatcattttacagtatatatactgttgtgcaacttgctctttccacttaatatctcaaggaatcttttctttgaatctttatagccatgtacctcaatcttagtagttttctttattttatttttgaataggaaatacatttacatggttttaaaaatcaaaacaatatactatgtatatattgagaagtctgacttccatccctatcctactcctattccacccttgcttcctcctgtcccctgtaggtaaacattttataactttattaagcatcctgtcagcatttcttatgcaaatatgtacatatatttttatttccccattttttttacaaaaagataaaatactatacaccactttatatcttcctttcttcacattatatcctttaaaaatatttccatattggccgggcgcggtggctcacgcctgtaatcgcagcactttgggaggccgaggcgggaggatcacgaggtcaggagatcgagaccatcctggctaacacggtgaaaccccgtctgtactaaaaatacaaaaaaaaaaattagccaggcgtgatggcgggcgcctgtagtcccagctactctggaggctgaggcaggagaatggcgtgaacctgggaggcggagcttgcagtgagccgagatcgtgccactgcactccagcctgggcgacagagcaagactgcaactcaaaaaaacaaacaaacaaacaaaaaagaacttccatattaatatatagaaagctgttttttttaacagttgcttagcattcctttggattattaaccagtctcataaatgagcgctattgaatagccctgtacctacatcagtttttacatatgcagtatatctttgggatgaattcccagaaatggaattgaaattgctgggtcaaagaggaaataggtgtaattttcttaggtattttcacaagaagtgttaattctaactttctgttttgaaatgatttcaaattttcaaaggagttgcaagaattgtacaaagaactgtatctccttcacccggatgcaccgggtgaattatatgtattatataattgtatctgtaggccaggtgcagtggctcactcctgtaatcccagcactttgggaggctgaggcaggtggattacttgaggccaggagttcaagaccagcctggccaacatgataaaactccatctctactaaaaatacaaaaattagccaggcctggtaccccatgcctaagggtgaggcatgagaaatgcttgaacctgggaggcggaggttgcagtgagccgagatcgcaccactgcactccagcctgggcgacagagcaagactctgtctcaaaaaaaaaaaaaaaaaaagtaaaaaagttttttaaaaagatgtatctatatatacatatttacatacacacccaagtgtgtatgtatatatgtttgtgtgtatgtacacaaacacattatttttatatgatatgatttttttatgacatgattatttttatgacatttgagagtaagttgtagaaattatgtttctttattcctaaatacctcattgtgtatttcctaacaaggacattcttttatataattaaattttaataataaaaatcagaaaatttaacatcaatgcaatataattatttagcctatagtccatatttaaattctaccataccttatagtatattttactatacctcatagtaattttttttagtccaaaatatcacacattgcatttagttgccatgtctcttttttttttttttttttgagacagggtctcactctttcgcccaggctggaatgcagtggtatgatcttggctcactgcaacctccgcctcccaggttcaaatgattctcctgccttagcctcctgagtagctgggactacaggcatgtgccaccacactcccaccacacccagctaatttttgtatttttagtagagacaaggtttcactatgttggccaggctagtcttgaactcctgacctcaagtgatctgcccacctcagctaagtgctgggattacaggcgtgagccaccatgtgtggcctagttgccatgtctctttaatctactttaatctgaaacagttcctcagccttgtttgtttatatgaaactgacatttgtaaagactagaagccatttgtcttgtataatgcctttaatttatatttgttttatgtttcctcgtgattttatatatagagtttgtttgtttgtttgtctgtttgtttgttttgagatggagtctcattcttgtcacccaggctggaatgcagtggcgcagtctcggctcactgcaacttctgcctcccaggttcaagcaattctcctgcctcagcctcctgagtagctgggattacagatgcctgccaccatgcctggctaatttttgtacttttagtagaaacggggttttgccatgttgcccaggatggtctccaactcctgacctcaggtgatccgcccgccttggcctcccaaagtgccgggattacaggcatgagccaccgtgcccggacctcatgattgtatttatttatttatttaatattattattattatttttttttttttgagatggggtcttgctctgtcacccaggctggtgtgcagtggtgcgatatcggctcactgcaaccgctgcctcccagattcaagcaattctcctacctcagcctcccaagtagctgggattacaggcatgtgccaccacacccggctaatttttttgtattttttttagtagagacgaggtttcaccatattggccaggctggtctcgaactcctgaccttgtgatccacccaccttgacctcccaaagtgttgggattacaggcgtgagccaccacacccagccttatgattgtatttagactagacatttttttggtagtatattatttagccattgctgtgtaacaaattatcccaaaacttagtggcttaaaagaagcatttattatctcataaattttgtggatcaggactgggtatagctttgctgagtgcctctgcctcaaagtcttacaaggcagcaattaaagtgtcacctaaggctattgtcttatctgaagggtcaacagaggatggatccgcttctaatctctctcacatagttaatggcaaaattaagttccttgtggattgttagactaagggttccagttccttgctggttgttagcttgaggtctacctcagttccttgccatgtggacctccatagggcaaccagcttctgttagagcaagtaaaggagagtgccagagagggcaaatgtgatgaaagccacaatctttttataaacctaattttgaaagtgacatacaaggctaggcatggtggctcaaacctgtaattccagcactctgagaggccaaggagggtggactgcttgagcccaggagttcaagaccagcctgggtaacatgacaaaaccctgcctctactaaaaatacaaaaattagctggtctggtggtgcatgcctatagtcccagctactcaggaggctgaggccagagaattgcttgaacccaggaggcggaggttacagtgagccgagatcacaccactccactccagcctaggccacagaatgaaaccctgtcaagaaagaaaggaaggaacaagggagggagggaggaaggaagggaggtagggaggcagggaaagaccgagaaagtgacataccatcatttttgctgtagtttgttcattagaagcaaaatcacttggtccagcccacactctggggagatgattttctaactccatttgtaataacttattctacttttattagttggcattatacagtaagaaagagctttcttttctcttcttatttattcatatatggctcatgtgttttttccaatgagttatattctattactaacattttttattttgacctcaaattgttttagatgttaccaataagaacctcttcaagctggttcttgtgtccttttgccataactctctcattttcttgaaccctttcttactttctgatataagaaaatattagagactcatactttccttgttccagttctgagatgaaccatttatccaaaagccttgcttcattttagtagggaatagtatttagaaactaagatctgggtgtgaggtatgctcactgctaatgggctgtcactgtttctaggccttgtcagcagacggagctaggaaaaacacacataaacacacccatatttatatttgtacacacactccctcaaaatcgtgagttcatattgatacctccagttctggttcttcctagccttccccctttccatctttgtatttttattttccaacagtaagaaccctggctcccagtgctatgaatatatttactcatttgctccatccactgcactccagcctaggccacagaatgaaaccctgtcaagaaagaaaggaaggaatgagggagggagggagagaggaagagagagaaggaagaaggaagggagggagggaaaactgagaaagtaacataccatcatttttgctgtagtttgttcataagaagcaaaatcacttggtccagcccacactctggggagatgattttctaactccatttgtaataatttattccacttttattagttggcattatacagtaagaaagagctgctgaagatttgcttgcaattggttgtctttaaactgagggtatattgtcaaagtactgtgctgaaaagttacctgtagtatagttatgtgattcattaaaataaagtttgtttctattatgtgcagttttagagttttgccacactctggttgattagtatattttctgttgcttttttgttttgttttgttttgttttgtttttgagatagggtctcgctatgtcacccaggctggagtccagtggtacaatcacagctcactgcagcctcaacctcgtgcacttaagcgatcctcccacctcagcctcccaaatagctggggctgcaagtgcacaccaccatgactggctaattttttaattatttatttatttatttatttattttagagatggggtctcactatgtttccccaggctgaccctgaactcctggggtcaagtgatcctcctgccttagcctccaagtgctggtattacaggcataagccaccacacctagcctagtattcttttttgaatatgtaaaacattaacataaagtcaaaactattaaaaaaaggtgtactcagaaaattgtcattcctcccctataccttctgcctcattcacaccacactctgtagataatcgatttcattagtttgtggtttatcctcactgtgtttctttttgcaaaacgcaaaaacaaaacctatacatatttatattttcttatgtcctcttctttcttacacaaaaggtaacacactatgtaggtagtcctggctttgaacagtttcactataaaaatatttgttactacagcttaaataacataagtctcctaaaaataattcaaattttagttaccatggtatattaactttgagtagttccataaaggacaaacttggctgctagcccttcagtccacagagcactttgaaaataacagatgagcaaaataatgtggccaatcacatgacttctttcaaagtatgtcagtgatcagtcactgtgtgcctataatttagttcatgcacagacagcaaagcatgtagttgtgttgccttccagtgataaacccacataacattttagaaaaatgtattaagaattggccagcaaagataaaagtgcagcaaagaaacaaaagtgataatgttttcagtgaaatttgaattgaacataaatggagttatagaagaaatagctgaccatgggaatgttcacactgctactttcaagaatctctagaagggcagctaaaggagcttagtgaaggtgaatttattgacatgaatgagaaaagtaattgtgatgaaaaggatgaagatgtcccagagaaagtaatgccagcaaaaacttcacattaaaggaactctcagatatttcaaagcattgaaacctccaagaataaataaaatgttggaagttgatccaaacttagaaaggagtatggcaacttgtcaagatgaagaaaaggtgcttattcctttttatttatttatttagagacagagtttcactcttgttgcccaggctggagtgcaatggcatgatctcagctcaccgcaacctccacctcctggattcaggcagttctcctgcctcagcctcccaagtagctgagattacaggcatgtgccaccacgcccggctaattttgtatttttagtagagacagggtttctccatgttggtcaggctggtctcgaacccccaacctcaggtgatctgcccacctcggcctcccaaaacactgggattacaggcatgagccaccatgctccacctgcttattccatattatatgttataggatgaaaagaggccaaactaatcttgacatgttttttacaaggaaataatcctccatggttctaatttttttttttttttttttttttttttttgagacagagtcgcgctctgtcacccaggctggagtgcagtggcacgatcttggctcactgctagcaccgcctcccgggttcacgccattctcctgcctcagcctcccgagtagctgggactacaggcgccggccaccacgcctggctaattttttaaaaaatatttttagtagagacggggtttcaccgtgttagccaggatggtctcgatctcctgacctcgtgatccgcccgcctcggcctcccaaagtgctgggattacaggcttgagccactgcgcccggtgggtctaatgttttaaattacactgtgttaaataaatattagtttgttggttttttttttagtttttttatttctctacaaatttacaaccaataagagtttttaatgctttgacaaaaaatgttaaaggtcatagtacaatcgcatttcttcccattgattattaacatcactttacatagtttcatcttgcattagcaattttgtgtgtgtgtttgtggttttaaggagcggagagtttaataggcaagaaggaagggagaagacagaaggaaggagctcccccttacagagacagagggagcggggctccaaaagaggaggtccccatctaccgcggataccagccaggtatatatgcagaggctggtggaggtgatgtctgatttgcatagggctcaggggattggtttgaccaggcatatcattcacgtagcccgagaaaaagctggccctcccaccccagccttttaatatgcaaacgtagggcgccatggatgttctaaacacgtggagatatgtggggggcagccatgtggccaggaacttgtggggcaagggcaagaaggctgtgggaatcgccaagttgaatggacctagtttctaatggcctgcatttgcatatcaaaggttgctggcctggctcctagagccggggctttaaaagaaacttttccggagatgctttaaaaaatgaaaacttcccaaggaccccttttcctgtctatctgcataaaataatttcttttattatttatttatttatttatttatttatttatttatttatttatttatttattttgagacggagtctcgctctgtcgcccaggctggagtgcagtggcgcgatctcagctcactgcaagctccgcctctcgggttcatgccattctcctgcctcagcctcccgagtagctgggactacaggcgcccaccaccacgtccggctaattttttgtattttcagtagagacgggatttcaccgtgttagccaggatggtctccatctcctgacctcctgatccgcccgcctcggcctcctaaagtgctgggattacagaataatttcttaataactcctaccacattcctccctgtggcgatatcaaactaactgctgttaggaggctttgggcgaccattgcttctggctacttcctgctgaaaaggggcgtctaatggagaacagcagctagggctcctcctggggttgatctaagggtcctcggaagaatggcgtccatgtgtggttcagtttacagcaccgtttggagtttgattgcttctaggcgagaagaaacaattcaagttatagtattgagtatacagagtccaaatatcaatacaagacatataagcaagagagtgcttaataaaggggttaaccaattccataaagaagactggaagtaattaaagagggattgtagccactcggggctgaagcccacattttccctgagcctgtcaataattttgatttgatttttaagtccctgtagatttgcctcttctttactacaggtgttaatcccaaagaagcatgtttcatttaaaaatgcattactggccaggcgtggtggctcgcgcctgtaatcccagcactttgggaggctgaggcgggagcatcatgaggtcaggagtttgagaccagcctggcctacatggcaaaaccccatctctactaaaaatacaaaaaattagccatcgtggtagtgggcgcctgtaatcccagctaattgggaggctgaggcaggagaatcgcttgaacccgggaggcagaggttgcagtgagccgagatcgcaccactgcactccagcctgggcaacagagcaaaactccatctcaaaacaaaacaaacaaacaaacaaacaaaaactgcattactaaatccaataaaaagtcctagtagactcagtgatagtaaaactttcatgcttcctttttgccagtaactattatccctgctataaggatactaattaagcaaaatacgacagcaatggaaactctgtccaatatttcagttagaaggtgctaccatggataaccctattgcaaatagtagagtgaggaaagcagttcccacaaatgtggtgtggtaggtaatttccatctaaaattttacttgccaacatatagaattcccctctgtgggcctacgaagttccttggttttattttcccaaacaaagaaacctccgggttacaggtaccttacttactttcattacctggcacaatttgcaaaataattgcccagaactagcatattgattcacattttcacattacccatccctttttcccccccaccaagctgcagaagatcaccacttgattcacaggaataagcagggccagggttagtctaaaatgtaggcaaaaagcttaaaaacaattaatgagactagggtttaatgacaaatgtatgataagctttggagcaaaatttttctctccagtcctcatttttggtaaaaactaattatgaatgaactttaatcttatacttggcctgattatttgcatgaagtgcagcaagaatggttatttctacataggacttttggattggctttgatgaaacactgttccacaaggaatttcagattagacttttaaagctgagcccagacatgggtttgtatcctctaatacctgtgagttgggttatcctctcctcttgaggtcccaagataaactcagagcttccagacctgttagaaagtgacattcttcactgaccacaggttaggaaccctgtgtggggactgtgtagacaaggtgtgaggccagttctccccaaggggcttttattggctctgcatgtcaagcttgattccttaaagggaaacacaccctttcagttaaagccttggcaaaataaccggtttttccaattgtgttctgttgacaaagaaaaatggattcttgctgcactgatgcgaacaactatattgccgtaagttaagagtacttacagatagtctccaaattttagaggaaccaggcagagaaaaatgaacatgctccaaattttgttcacagtagtataccttacttgattattaaaggccataaatagtttaaaataagtttcctttcccagtccatgcaccaaaatgatacggctctgatgagtggaggaacaacagggttcctggtcctcatgctggtttagataaaatgacacagacacatgtggagtggttttaaggagtggagagtttaataagcaagaaggaagggagaagagagaaggaagacgctcccccttgcagagacggagcgggggttccaaagctgaaagaggaggtcccccacattaacaatttttaaaataccgtacaactgcagaaaatgaggactgcctgtacatactgtttgacactttgtttttttttttaacttatcaactttattttgtttgtttgttttggttttgggtttttgtttgtttgtttgttttggagacgagtctcactctgtcagccaggctggagtgcagtggcacaatcccagctcactgcaacctccacctctcgggttcaagcaattctactgcctcagcctcccgagtagctgggattacaggtattcgccaccacatccagctattggttttggtttttgagacagggtcttgctgtgtcacacaggctggagtgcagtggtgtgatctcagctcactgcaacctctgcctcccaggctcaagtgatcctcccacctcagccttccaagtagctgggactacaggcatgcacaccatgcgcagctaattttttctattttttgtggagacggggtctcactatgttgcttaggttggtcacaaattcacagcctcaagcagtcctcctgcctcaccctcccaaagtgctgggattacaggcatgagccaccacatccagccttaccagctatattgaagtataatttatataacataaaatttgccttttaaaattatacagtgcaatgcattttgacaattgtttacatctgtgtaaccaccatgcaatcaaaatatagaacatttctataaccttcaaaagttccctcatgcccctttgcaatcaattcactacttctccagctccaggcaacaactggtctgcttcctgtcactataaattagtgttgcctctttcagaatttcatctaaatggaatcctataacatatactattttgtatccatcttcttttactccaaagttcttgaaattcattcatgttcctgtgtgtatcagcagcgtgttccatttgattgttgagcagtattgcattgtgtggatatatcacaatgtgttcattcattcaactgttggtggacatttgagttgtgtccagtttagtgctattctgaattaaagtgatgtgaacaatcatgtacaagtatttttgtaggcatattttttttatttctcttggataaataccccaaaacagaattgttttgggggtcatatgaaatgggaagtatatgcttaactttataagaagctgccaaactatttttcaaaatggtaatatcactttacattttcatgagcaatgcataaagcgttccgcttgctacattttctcaccaatgcttcctattgtcaattttttaaattttagcaattctagtgggtgtgtgatactatctcattgaagtttcaactgtttttccctgttgactagagacactgagcaacttttcatgtgttgtctatttgtatatcttcttgaagcattcgttcatctttaactgagctgaacgccttcttaaaattgagctatgggagttttaaaatatatccttgtagctgggcgtgatggcaggtgcctgtaatcccagctactcaggaggctgagacaggagaatcgcttgaacccaggaggcggaggttgcagtgagccgagactgcaccactgcactccagcctgggcaacagagtgagacttcatctaaaaaataataattatacatgtaattatatatgatttttatatatgtaatatatatattcttgatgtgagctctttgtcacatacatattttgtggatattttatcccagactatgacttgtcttttcattttcttagttgtgtcttttgaagagcagaagatgtaattttgataaagcccaatttattttttcttttatagtttgtatttcttatgtcctattcaaaaactccttgcctactgaaaacttatgatgattttctcctatattttcttttagaagttttatagttttaccatttataatttggtctatgaatccttttgagttgatgtttatgtatggtgtatggtgtgaggtaacaatgaagattcatatttttttccaaaggaatatccaattgtctctttggaaaaatatgctgagaaggctatcttttccccaccaaataatcttagcaccttaatcaaaaatcatttggccatggacatatgtaggtgtgggttttttctgggctctctgtgttagatggatagatagacagatacagatatataactgtgtttacacatatgtaactgtaaacacagttatatatctatatatccaccaacagttgaatgagaataaactattgttataagcatatatacacattgtatatatatgtgtacatatacatattgcatatgtatgtatacatatatacacacaaagtatatatatgtatgtatacatatatacacacttaaagtaatggcctccagttcgatccaagttgctgcaaaggacattatttcatgccttttcgtggctgagtaatattccatggtgtatatatatatatgtgtgtgtgtatatatatgtattatgtatatatatatgtgtgtgtgtgtgtgtgtgtgtatatatatatatgtgtatatatatataccacattttctttatccactcattagtcgatggggacttaggttggtttcacatttttgcaattgtgaattgtgctgctataaacatatgtgtccaagtgtctttttcatataattacttattttcctttgggtagatacccaatagtgggattgctggattgaatggtagatctgttttttgctctttagagaatctccatactgttttccatagaggttgtactaatttatattcccagcagcaatgtgtaagtgttctcttttccccacatccacaccaacatctattgttttttgactttttaataatggccattcttgcaggaccaaggtggtagctcgttgtggttttaatttgcattttcctgatgattagcgatgttgagcattttttcatatgtttgtgggccatttgtataccttcttttgagaaatggctatttgtgtcctttgcctactttttaatgggattgtgttttatttttcttggtgatttgttagttccttgtagattctggatactagtcctttgtcagatgtgtactttgcaaagataatattttggatgttatatttccattataatttagttcaaagtattttctaatacaccttgcaatttcttctttgacccatggattattttaaagtttgttattttgtttgtttattttgagacagagtttcactttttttgcccaggctggagtgcagtggcacaatcccggctcccagattcaagcgattctcctgcctcagcctcccaagtagctgggattacaggtgcccaccaccacacccagctaatttttttttcttttttttttgagacagagttttgctcttgttgcccaggctggagtgcaatggcacgatctcggctcactgcaacctctgcctcctgggttccagcaattctcctgcctcaacctcctgagtagctgggattccaggcatatgccaccacgccaggctaattttgtatttttaatagagacggggtttcttcatgttggtcaggcgggtcttgaactcccgacctcaggtgatctgcccgccttggcctcccaaaatgctgggattacaggcatgagccactgcacccagtccaattttttgtatttttagtagagatggggtttcatcatgttggccaggctggtcttgaactcctgacctcaggtgatccgcctgcctcggcctcccaaagtgcagggattacaggtatgagccaccatgaccagcctaaagtgtattgtttagtcaccaaatatgtaagtattacccaaatatatttgtcactgatttctaatttaattgtattgtgatccaaaaatatacattgtatagtttctattcttttaaattcgttaacatttcttttatggcacagaatatggtctatcttggtgagtgttgcttacacacaactgtgtaactgaaaactgtgtattctgcttctcgtggttgttgtatcctataattgtcaactagatcaagttagtaagagtgttgttcagtgatcttttcttcttcagtgtttactgtatttgctaatcccatccagtgaagtttccatttcatatattgtatttttcacttttagaagttccatttgactctttcatttccatcctcaattatcttcatatttttctttaaatttttgagcacatttataatggaggttttaaagtccttgtctgctaattttgtcacctctgtaattcctatgatgattttcttcctggcttggggtcataatttgttgcttatttgcatgtctaataatgtttttattggacagcagacattgtaaatgttatatttttgagtgtttggattttgtctttctttaagaactattgcagtttgttttggaaggctattatgttttttgcagatcaggttgatcttttcaaggcttgtttttaagctttgttaggacaggtctgtagtaacttttgccttgggctaatttagacctaccacttaattctgacttttttgattaatctgagtgttcagcagggtctctttattatggctaaatgaaattcaaacattttccagccctatgtgaccatcaagaattcagctaatagctccctggcagttcttcgcccagctgcagaaaagtgtcagtgcactctatgtatgctcagattattatttagccaaagacttggggatccatattaatattcctggagttctttgtgtagctccattctctttagtactctatcccataaattctggctgcctcaatctcctaatctccccaaactctaatatctattcctcaactcagcaaaaccatggtgttattcttggatttcccctttcctgccccacagtctgaaagttgtctccaggcaaaaaaaatggagatcctagtttgcggatcctcatttccttctccttttttttttttttttttttttttttttgagatggagtctcgctctgtcacccaggctggagtgacgtggcgtgatctcggcttactagaaactccggctcccgggttcatgccattctcctgcctcagcctcccgagtagctgggactacaggtgcctgccaccatgcccggctaattttttgtattttgtttagtagagacggggtttcaccgtgttagccaggatggtctggatgacctcgtgatctgctcacctcggcctccaaaagtgctgggattacaggcatgagccaccgcgcccggcctgcttctcttctcttatgggttagaatcctgcactgtcttttgaacaaatgtctaaaagcttttatcacacattttgatccacttcccagttgttatagtggtatatctggtttcacatgactgaaaggaaaagttttcaccttgctttttgtactaataatatatcctggaaatcattctatataaatttatagaaatcttcatttttaaaatagcttcataaaactccattgtaaaaaccaggtgcagtggctcatgcttgtaatcccacactttgggaggccaaggcgggtggatcacctgaggtcaggagttcaaggccagcctggccaacatggtgaaactccgtctctactaaaaatacaaaaattagctgggtgtggtggtgggcgcctgtagtcccagctacttggaaggctgaggcaggagaattgcttgatttcaggaggcggagattgcagtgagctgagattgcgccactgcactccagcctgggctacagagcgagactccgtctaaaaaaaaaaaaaagcaaaaaaaaaaactccattgtatgtgcacatatcattatctgttcaacccatctatgacttgtcatttaggtagtttccatccaatatttttgcaatataaaaaatgctaatgaagaacctgagatatatatatatctatatatatagatatatatgtttgttgttgttgttgttatttttgaagtatgtacgtataataaattcctaatagtgtgattgctgcatcataaggtaaaggcatatgtagttttgttaaatatagctattccccatcttgcattcctacaaatagatgagaatgtccattgtcccatagtctcctttgcagagtatattgtcaagctttttaattgttgccaacctgatgggtaaaaagatatctccaaataattttaattaaaatttctcttattatgaatgaggttaaatagtttttcatatgtttaaaagccagtttatatctttttgtttttttagagacaggaatcttgttctgttgcccaggccaaattgcagtgatgcagtcatagctcactgtagcctcgcactcctgggctcaagcaatcctcctaccttagcctcccaagtagctaggactacagatggatgccaccatgtccagctaatttttttatttttttgtagagatgtgaggtctcactatgttgcccaggcttgtcttgaactactggcttcaagtgatcctcccacctcagcctcccaaagtgctaagattacagccatgaaccaccacaaatgaccctatatatttttttgaattgtctgttcatgtcttattttcatttttctagtagttttttttttaagtgttttagcctaaatttgtaaaaagtttaggggatatatgaagggactctaaatgtttatgaagaaatttaattaaaagataaaaataaaaatataagctttatttttcaacatgagctccatcaagttcaaggcacttttgtaagcaatgatactagccatttagttcacccctaaagaactgagagtcctgggaatttagccatgtcaatgcagtattttttatattggttactgaagaaaaaatgggtgccctttaaagttgtaagattaggaacaaaaacaagtcagaagaagccaaatcagcactgaaaggtgggcacttaatgattacccaagaaaactctcaccaaattgcccttgcttcatgagaggaatgagcgggagcattgtcgtggtcaggaaggattctggggaagttttcccaggcattttttctgctgaagctttggtaactttctcaaaacactctcataataatcagatcttatcactctttggccctccaggaagtcaaccagcaaaatgctttgaacatcccaaaaaagcgcttgccatgacatttgctcttgaccagtctgcttttgcattggtcaaatgccaccacttccacctcttgtgctttgttttcaggatcagactggtaaagtcatgtttcatctcttgttacagtttttttttttttaagaaacccttcaggatcttgatcacatttgtttaaaatttcaactgaggctgggcccagtggctcatgcctgtaatcccagcactttgggaggccgaggcgggcaaatcacgaggtcaggatttcgagtccatcctggctaacatggtgaaaccccatctctactaaaaatacaaaaaattagccgggcatggtggcaggcacctgtagtcccagctactcgggagggtgaggcaggagaacggcatgaacccaggagacggagcttgcagtgagctgatatcatgccactgcactccagcctgggcaacagagtgagactccagctcaaaaaaaaaatcaagtgaaaactctggtcttaaactgcagctgatctattttatttttattttttttcagacacagccttgctctgttacccaggctggagtgcagtggcaccatcatggctcaatgcagccttggcctcgtgagctcaagcaatcttcccacctcaggctcccaagtagctgggactacaggcacatgctaccatgcctggataatttttttgcagctaatctagatgtaatggttttggcacccatctaatggaaagtttgctcaactttaatttttcagtcagaattgtgtaagctgaaccgagatgtctatggtgttggctattgtttctgctgttaattgtaggtcttctttaattagagcacagacaagatcattttttttcctcccaaattgatgtagatggtcttttgctgtgggcttcatcttcaacattgtctcatcccttcttaaaacaagctagctacttgtaaactgccgttttctttggagcattgtctccataaacttttcacaaaacatcagtgatttcaccgttcttccactcaagcttcatcataaatttgatgtctgttcttgtttccattttagcagaattcatgttactctgataggggctcttttcaaactgttatcttattcttcttagtgcctcaaactagatcctattcagacatggtataacaagttagtatgggtttattttggtgcaagaaatattttgaaatccacacatttttttcataatatgcattttccatgaagtttttgaaaactccttgtattaggaatattagtcctttgtccagtaaacagactgcaaatattttctcacagctcatcatttaccttttggcatttttttgcaatgcaatttttttccctttgtttttgttttttgtgtaatgaatcaatgttttcttttttttttttttttagaccaagtctcactctgtcacacaggctggagtacaatggtgcaatctcagctcactgcaacctctgcctcccaggttcaagtgattctcatctctcagcctcccaagtagctgggattacaggcacatgccaccatgcctggctaatttttgtatttttagtagagatggggtttcaccatgttggccaggctggtctcgaactcttgacctcaagtgatccactcacctcggcctcccacagtgctgggattagagacgtaagccactgcccccggccaaatcaacgttttcttatattgcatttaggttttaagtcatagttagaaagcctttccccacacctaggttatagaaacattcattacttttttcttccagtgctagtacttgcatggtttttggtttccacatttagatccctgatctaattggagtttattcttttgtgtgctgagatatggatctgattatatcttttttcccaaatggctatccagttgtcccaatgccatttattaagcacttcatctttgtcccagtgatttgagatagcatctttatcatgtaccaaacttctatagtgccagaagatttttattttttttagacagggtctggctctgttgcccaggctggagtgtagtggcacaatcccagctcgctgcaacctccgcctcacatgctcaagtgcccgcacctcagcctctcaagtagctgggactacaggcacatgccaccacaccaggctgatttttatatttttttgtagaatgagatttcaccatgttgcccaggctggtctcaaactcctgagctcaagaaatccgcccacctcagcctcccaaaatgctaggattacaagcatgagccaccacacccggctgccagaaaattttaatgatcagaaaaccacaattctttcttcctctgttatatgttgaagtaaaatacttcatttagaaaactaagccgggcacagtggctcacacctgtaatcccagcactttgggaggttgaggcaggcagatcacctgaggttaggagtttgagaccagcctggccaacatggtgaaaccctgtctctgctaaaaatagaaaaatttgctgggcatggtggcgggtgcctgtaattccagctacttgggaggatgaggtaggagaattgcctgaacctgggaggcagaggttgtggtgagccgagaccacgccattgcaccccagcctgggcaacaagagcaacggtaaactccatctcaaaaaaaaaaaaaaaaaaagaaagaaaaaagaaataactcagccatacaaggctacccatttggtgagaactaataataagttagatagcaaggtaatagcaaaatgtgggtgcaaaattaaagcaagttatttctgaggagaatgtaggtctcatggaagattttcatgtggacaaatttagtaaattttttgcaggtagtttcctgacatatttaacatttgtgatatagtaaacaataagaaggtactaaaggctgggcgcggtggctcacgcctgtaatcccagcactttgggaggccgaggtgggcggatcacaaggtcaggagatcaagaccatcctggctaacacggtgaaaccccgtctctactaaaaatataaaaagttagctgggcgtggtggcgggtgcctgtagtcccagctactcgggaggctgaggcaggagaatggcgtgaacccgggaggcggaacttgcagtgagccaagatcaagccactgcactccagcctgggcaacagagcgagactccatctcaaaaataataataataataataaggtactaatatgatccagactagaagagaatagcactaaaatgggagatggggtaaacctgtggttttttttaccttaggcttttgacttccaaaattattgtttttgctgggtgcggtgggtcactcctgtaatcccagcactttgggaggccaaggtgggaggattgcttgagcctaggagtttgagaccattctaggcaacaaagcaagaacctgtctctaaaaaaatttaaaaattagccagaaatggtggcacatgtctgtagtcccagctacttgggaggctgaggcaagaggattgcttgagccttttgaagttgaggcttcagtgagccatgatcaccccactgcactccagcttgggcaacagagcaagaccccatctcaaaaaataaaacaaaatagactgggcacgatggctcacgcctgtaatcccaccactttgggaggctgaggtggatggatcatgaggtaaagagatcgagaccatcctggccaacatggtgaaaccccgtttctactaaaaatataaaacttagctgggcgtggtggtgcacacctgtagtctcagctactcgggaggctgaggcaggagaatcgcttgaacccgggaggtggaggttgcagtgagccaagattgtgccactgcactccagcctggcgacagagtgagactctgtctctaaataaataaataaataaaacaaaataagtaaaataaaataaatgtttgtagttccaaaatattttgatgacataatttcttcttgttctaataaaactacatatgcattggtcctatgacctagtaatcacactattaggaatttatcataaatacacacctcaaaaattacaaaaatacatatataccagcttatttattacagcgttatttgtaattgcaaaaacattgtagatagaatggaggtcacataaaacttattcttaagattcagaccgggtgcaatggctcacgcctgtaatctcggcactttgggaagccgaggcaggcagaccacccgaggtcaggagtttgagaccagcctggccagcatggtgaaaccccatctgtaccaaaaatacaaaaattagctggtcgtcgtggcacgcctgtaatcccagctactcgggatgctgaggcgcgagaactgtttgaaccccggaggcagagactgtagtgatctgagatcatgccactacattccagtctgagcaacagagcaagacttcgtctcaaaaaaaaagatcatagatcatcttatcaaatcaaagtatgcaaaatattcaagtaaacttcagataaatatgaaggctaaaccattcagcttcttcaccaaacccttgaatgtcccacctgtctaaatggagatacatgtttgtttgatttattggttaactgtttttattccatttttcctcaaatgatcccataatttgaccttaggaagctgttcaaatagacacattaggttgaatggaaagactactcgatgatatttaggattttaagaggattttatgtattttttccttgtgtgcaataatttaatagcatcttgaataggattttctgatattactaaccctctgggaataatattaggtaattagacagttagctaatattaaaatatgtatcaggtaatatttattgagagtttcctctgtgccaagcaggatcaacttcataggcaggcgacctgtgcggggacacagggcttcatgcttagataggcccccttgctttgaaggcccctaccctttggttagggctctgctgttaccatcttgaaattcttaataatttttattttatttttttgagtcagggtcttgctctgtcgccctggctggagtgcagtggactcactacagtcttgaattcctgggctcaagcaatcctcccacttcagccttctgagtagttaggacgacaaacacacgccaccatgctcagataagttttttgtttgtttgtttttttgtttttgtttttgttttttgtagagatgggactgtccctatgttgctcaggctggtctcaaattcctggcctcaagtgatcctcccacctcagcctcccaaagtgctgggactacaggcatgagccactgtgcctggtcaatcatttttattaacaagcccaagccctcttttttttttttttttttttgagacagggtctccctctgttgtccaggctagagtgcagtggtgcgatcttaccttcactgcaacctctgcctcctgggttcaagtgattctcctggctcagcctccctagtagctggaattacaggcacccacccccatgcctggcaatttttttgtatttttagtagagatggggtttcaccatgttggcaaggctggtctcaaactcctgacctcaagtgatccacccaactcggcctcccaaagtgctgggattacaggtatgatccactgcgcccggcctccaagccccctatttttattttgcactgaccctacaagttacgtagctaggcttagttatgtttttagcaaggaaagtgtataatctcatgtaccttttgaaagattactcaggtctctgcatgtgaaatggaatttagggaatgcaagagagggagtaaaaataacagcgaggaagctatgatagcatttaaggttgctttgactcaggggtagcagtagatagggtaagtaattgatagtttcaaaatatattttgggagtagtaagcattggtatggattagtaatatactggatgtggggatgcagaaaaaaatattaaaaattacttctgaaattctggctggaatagaagtgccacttaccaggtaaggaaggttggagacataacatatttgagggtgtggtcaaaagatgagtttgacattatgctatgtcatataaaagacatataaaagactacctattttataattcctttttaataaaatattcagaaaaagcaaaactgtggttgcctgaggctgaagctaggaagattgactacagacaagcatgagggaaattttgggggtgatgagagttttctaaaactggattgtggggttggttgcattactgtataaatttattaaaaatccctgcatcgtataggggcactatattgtatgtagaaagctgtgaaaagattttaaaaatgattgacatgtctgtggttatatcaatgagtactattattattcccattttatacataaagaaaataaaagagaagttaaaaataaaagtttcatggttacatagctactaggtgtaatatccagtattggaatttgaatctttttgacactaagaccttactctcgatcatataatacattcactttctattttaaagttatattatagccgggcacagtggctcacacctgtaatcccagcactttgggaagccgaggcaggcagatcacgaggttgggagatcgagaccatcctggctaacacggtgaaaccccgtctccactaaaaatagaaaaaattagccaggcgtggtggcacgcacctgtatcccagctactagggaggctgaggcaggagaatcgcttgaacccagaaggcagagcttgcagtgagacgagatcgtgccactgcactccagcctgggtgacagagtgagacaccatctcaagaaaaaaaaaattatattataaatgctgcatctcattggtcagaagctctcttgaaattataaaacaaagaagaaaaaagataaagactgggaaattgtgttgaatcagtatataaatcctgtatactggtccttccatttcccctagaaataagtgatacaggccaggcgctgtggctcacacctgtaatcccagcactttgggaggcggaggctggcagatcacctgaggttgggagttcaagatcagcctgaccaacatggagaaacccccgtctctactaaaaatagaaaattagctgggcatggtggcacatgcctgtattcccagctactcgggaggctgaggcaggagaattgcttgaacccaagaggaggaggttgtggtgagccaagattatgccattgcactccagcctggggaacaagagtgaaactcaaaaaaaaaaaaaaaaagaaagaaaaagaaaaagaaagaaggaaggaaggaaggaaagaaagaaagaagtgatacaacaagttacagcatctttgtttattatccactgtgagttgtattaccacactttacttggctctttggcaaactatattatctcttcagatcactagggctaggaaggcccactggtaacttgaaggagtaaatgtatcttctaaaaaatgcttacttccagggagattggatccacacaagtgaatacatatatagtccttagtgtatgctatgattattttactatgtcagtagcataaagattgctatattaataagcattaagtgcctgctgtgctagacagtgaggatgcaagtggccaccaaaatagcatggtccctgccctcctggagcttctttttttcttcttcagtgggggaagcagatactttgcttatgcaaaaataattataaaatttaaagttgtgccaagttcaatggaaaaaatataaggtgttctgagagagcataacaaaggatcctggttttaactggggcctaatggaagacctctattaggaaataacatttaaactaagaccagacagacctgtagaaattagcaaagcaaagggagggaggaaaaagcagctttcctggcaaaggaacaatttgtgtgaaggccctgagacagggaagggctggggttctgaccaccctccaagtggtgcaatggaatatagtgagagagggagaagacatgagaacttggatactatgcaaaggatttggtattttaattcaagagcagtatgatgctactgaggagcagctggacaattgtgtgatccaattaaaattttaggaagatgaacctcgctattgtggagaatgcatacacaagggttctgttggttcatgaagaggtcttaagaaaactatgagctgggtgcagtagctcaggcctgtagtcccatctacttagaagtctgaggcgggaggatcccttgagcccaaggagctggaagttacagtgagctatgattattccactgtactccagcctggatgacagagcgagatcctgcctcagaaacaaaaaccaaaaaacaaacaacaacaaaaacaacaacaacgaaaatctcagaaaactacaggccttattatcaagaaaatgacaggccttattattgagaaaactacttacatttttaaaagctgattttcaaaaaccagattgtgaattaagtgatgctgaataggggaaaaaaagactgataaaccagtgtatctctgaataacccactagatcagtgcttgtcaaactttaatgtgttttcaaatcaccctgatgttttgttaaaatgtaagtcatgtctcagtaggtctagaggagggcatttctgcatttctaacaagctccccggtgatgcctagaccattggtcctcacactttgagtagcaagtgattgggctatactctttattctaaattctaaatgtattctatcttctaatgcctatcagccctcttgctggtctggctaattatcaaacttgagcatttaaaactgggggttttcagagattaattgaagtgttaaagacatggaaatataggtcacatatggcttttcatctcttccggaaatatcctatatatccttacttcttttctacctacctaacctatgtgcctaccccttcacttatgttcaaggttctattatacttcaaaaggactctatgcaatcaaagtgatgtccaagacaaatatacagaaatagtatgaggctctaacactttacatctaatggagtggtttgcatcattaattgaggcttactctgtgccaggcactttacctgccttcttcatttaataggataggagcaggaactcttagaggttcatttcttgttcaaggatatacatctcatctctggcttatatcacagtggactcttttattcactatcctaatcattataattttgtttggtgacaacaattctaaatgcagaaaagttaaggctctttattctgtgactaaaggctttgtattttctaaagatttgtggagctttgctgccattatttcaataattttataaagatcctaggtggtaaataggcctggctttttttctttttgaaatcttctccgtcttcttcttcattagcagtgcaacttcttgtggcatatggtacccaagatcttgggaaaaggattgatcaagtaaagggaaacgatagagagagtgtgctctacaactgagatcatgctccttgtgaaagacagggtagggaaatttcttattgctccctggttcttaagaaatgagagctaacaatgacatccagttttaaaagaaataaaatctgaattgtacttttaaattttataagccagagttaaaccaatagattgtaactcctgctaatttgatagtagctccagataatgaggaagtgacagggaatgctaatttcatttggtaagagataaaactgaaattattaatgtctccacggaaatgctaaatgcctccttacaagtagggtccggctaattgtctgtcttccaacaagccagatttgttggtgtttttccagacaatgttgtgtagttttcggtttggttcgatcccctttcttgtgatcaaagaaagtgattcaaatgtttaatgagtcttgatttggattggagacttgcagaacggctagcctcacagccccaaggctggctttccctaaggtaggtttcctatgcaccgatactggcaaggcgctttggctggaaactctggaaggaagccaaaggaaagtgaagttcctggcgctagcgcgtgtcctgctcagagagcccggcgctagctcattcttcgtgcagttattggctgggactctgtgtgccgctgtcggccaatgaagacgctggagatcgggcccctgcccgtcccctttctgcgccccgggatgaggcagagactgaacagccggcgagcaaatcaacggcatccagaaagccatgtcggactcggcgcccagcgcccaagcgctaacccgctgaaagtttctcagcgaaatctcagggacgatctggaccccgctgagaggaactgcttttgagtgagatggtcccagaggcctggaggagcggactggtaagcaccgggagggtagtgggagttttgcttctgcttggtgccttgaacaaggcttccacggtcattcactatgagatcccggaggaaagagagaagggtttcgctgtgggcaacgtggtcgcgaaccttggtttggatctcggtagcctctcagcccgcaggttccgggtggtgtctggagctagccgaagattctttgaggtgaaccgggagaccggagagatgtttgtgaacgaccgtctggatcgagaggagctgtgtgggacactgccctcttgcactgtaactctggagttggtagtggagaacccgctggagctgttcagcgtggaagtggtgatccaggacatcaacgacaacaatcctgctttccctacccaggaaatgaaattggagattagcgaggccgtggctccggggacgcgctttccgctcgagagcgcgcacgatcccgatgtgggaagcaactctttacaaacctatgagctgagccgaaatgaatactttgcgcttcgcgtgcagacgcgggaggacagcaccaagtacgcggagctggtgttggagcgcgccctggaccgagaacgggagcctagtctccagttagtgctgacggcgttggacggagggaccccagctctctccgccagcctgcctattcacatcaaggtgctggacgcgaatgacaatgcgcctgtcttcaaccagtccttgtaccgggcgcgcgtcctggaggatgcaccctccggcacgcgcgtggtacaagtccttgcaacggatctggatgaaggccccaacggtgaaattatttactccttcggcagccacaaccgcgccggcgtgcggcaactattcgccttagaccttgtaaccgggatgctgacaatcaagggtcggctggacttcgaggacaccaaactccatgagatttacatccaggccaaagacaagggcgccaatcccgaaggagcacattgcaaagtgttggtggaggttgtggatgtgaatgacaacgccccggagatcacagtcacctccgtgtacagcccagtacccgaggatgcccctctggggactgtcatcgctttgctcagtgtgactgacctggatgctggcgagaacgggctggtgacctgcgaagttccaccgggtctccctttcagccttacttcttccctcaagaattacttcactttgaaaaccagtgcagacctggatcgggagactgtgccagaatacaacctcagcatcaccgcccgagacgccggaaccccttccctctcagcccttacaatagtgcgtgttcaagtgtccgacatcaatgacaaccctccacaatcttctcaatcttcctacgacgtttacattgaagaaaacaacctccccggggctccaatactaaacctaagtgtctgggaccccgacgccccgcagaatgctcggctttctttctttctcttggagcaaggagctgaaaccgggctagtgggtcgctatttcacaataaatcgtgacaatggcatagtgtcatccttagtgcccctagactatgaggatcggcgggaatttgaattaacagctcatatcagcgatgggggcaccccggtcctagccaccaacatcagcgtgaacatatttgtcactgatcgcaatgacaatgccccccaggtcctatatcctcggccaggtgggagctcggtggagatgctgcctcgaggtacctcagctggccacctagtgtcacgggtggtaggctgggacgcggatgcagggcacaatgcctggctctcctacagtctcttgggatcccctaaccagagcctttttgccatagggctgcacactggtcaaatcagtactgcccgtccagtccaagacacagattcacccaggcagactctcacggtcttgatcaaagacaatggggagccttcgctctccaccactgctaccctcactgtgtcagtaaccgaggactctcctgaagcccgagccgagttcccctctggctctgccccccgggagcagaaaaaaaatctcaccttttatctacttctttctctaatcctggtttctgtggggtttgtggtcacagtgttcggagtaatcatattcaaagtttacaagtggaagcagtctagagacctataccgagccccggtgagctcactgtaccgaacaccagggccctccttgcacgcggacgccgtgcggggaggcctgatgtcgccgcacctttaccatcaggtgtatctcaccacggactcccgccgcagcgacccgctgctgaagaaacctggtgcagccagtccactggccagccgccagaacacgctgcggagctgtgatccggtgttctataggcaggtgttgggtgcagagagcgcccctcccggacaggtaaggtttagcaagtcatgcttgaccctgttagtgcttttttattcctacatcatattgaggaaggaatggagctgtttttttagtgatgaagatgttttcctggtgatgcattcacactttcaactggcccttcctagatcaaagttagtgcctttgtgagatggtggcctgccagagtgtggtttgtggtcccatttcagggggaagatacttgactcatctgtggacctaattcacatcctcagcactcttttgctatcacaactaaccaatcttgctaagggatggttaagctaaaacacaagatctcagcgatcagagtttagcttggtatcatttacattaggaataagctgctggatacctctaaccagtggcagcttctaggaatacaaaaactacctcattcctccacctttcaagtgattgtgacatttgtattaaaactaatagctttttgataattttcctttgtttatacagatcgtgtacctcattctcagataattttttatgaatgaaatgaaattccaggcatcctttaaattttatttcaagcattctactggaaatgatgtgcaccctgcttacaaaatatttttaccttataacagtaatgcatgtttgctagaaaattcagaaaatacagaaaagtatttaaaaaattaaaactataatctccaaacccaaagataaccatttttaattataaaagtaataatttatttcaaaaataaatctaggcaacccaagaaaacataaagtagccagactcagtggtgtgcacctgtagttcttgctgctcagtgcctgaggtgggaggattgcttgagcccaggagttctgggctgtggtgcactatgctgatcaattgatcaatccactgtctgcactaagttcagcatgaatacagtgacctcttgggagggcaggaccatcaggttgcctaaagaggggtgaactggcccaggttggaagtggagaaggtcaaaactgctgtgctatccagtagtgggatgacatctgtgaatagccactgcactccagcctaggcaatatagggaaaccatgtctctttaacaataacaacaacaacaacaacaatcccagaaactacaaaaggagagtctttttggtgcctccagtgttagtccctgtccttccagccttatttttcttaagtatatgcacaatgtgaaaggtagataaattcatatccttagacaggtaaagcattcattaattcagggtggtatgcaaggatactatccaaggcatggtatccatgcaaggtgactgcaaggcctttgccctggagagaaccctatacatactctcaactgtaggagaaacactgttattttgttactcagtgcatcattgctatcaactcttggatttggcagttagtcaaatgaggttctaccatttaccaactaggagtctgtggccaagttactcaatctcctttctaagcctcttcctcatatgcaaaaagggaataataagtgttttataagattcatgcatgatataatgtatgcaaagtgtttagcatggtgcctggcatatcataactgttaaacaattattagccagctcctagcattttgggaggctgaggcaggcggattgcttgaggccagcagttcaagaccagcctgagcgacatagtgagatcctgtctctacaaaaaaaaaaaaaaatgtgttttcattagctgggtgtgttggcatgcacctgtggtaccagctacttgggaggctgaagtgggagaattgcttgagcctgggaggttgaagctacagtcagctgtgattgcaccactacacttcaaccatggcaatagagtgagaccctgtctcaaaaaaaaaaattatcagctattactataattatttttattagttcctcactcacctaaaatctcaaacacaccttagaaatacacatatgagaacaaccaaaaatgacaaagtagaagcacatatgaaaaggctaagaaagcatgaaagccagcaagaaataactgccgctcttctggtcagcctggaaagcaactggcattttccctagaacaatgttttcaaacttggttgcacattaaaatcacctagagaccttttaaaaattctgaaacccaggccacaccccgacaaatgaaagcacagtctctgggggtgggacataggcatcattttttgaaggtccccacttgatcctaatgtgcagacaaatttgaaaaccacagctttgggaggctgaggtgggtggatcataagatcaggagtttgagaccagcctggccaatatggtgaaaccccgtctctactaaaaatgcaaacattagctgggcatggtggcgcatacctgtagtcccagctactctagaggctgaggcggaagcatcagtgagggagaatcagtgaacccaggatgtggaagtttcagtgagcccagatcacaccactgcactccagcctgggcgacagagcgagactccacctcaaaaacaaaaagaaagaaagaaaaaagaaaagcagtactctggaacctaccaatccatcatttagcatatttgtgaagtaaagtgttattctggtatttgcagaaccagaatccagctttattgggccaggcccaatttttttaaaaaacatggtaaggtctcccagccttaaagtattacatagcatagctctaaaagatcactgtaggaagacataaaatggtatttcagtcatctaagggaaaaaccttcctaaagcactagcccctggacaactattatttaaacatctacagctgttcaatagatattgggttctttttggagggatgtgacaaaattcttgtataattagattgtgatgatgattgtatcagtttagtacatgtaaatacactgaaaaccattggattatacactttaaatatgtgatttgcatggtatgtgaattatgtctcagtaaaaatctagagatggggctgggctcagtggctcacgcctgtaatcccagtacttagggaggctgaggccagcggatcacctgaggccaggagttcaagaccggcctggccaacatggtgaaacttcatctctactaataatacaaaaatcaggccgggcctggtggctcacgcctgtaatcccagcactttgggaggcggaggcgggcggatcacgaggtcaggagtccaagaccagcctggccaacatggtgaaaccccgtctctactaaaaatacaaaaattcaccaggcgtggtggctgaggcaggagaatcgcttgatggtggaggttgcagtgagccgagatcgcgccactgcactccagcctgggtgaaagagcgaaactccatctcaaaaaaaaaaaaaaaaaaaaaatcagccagatgtggtggcaggtgcctgtagtcacagctacttgggaggttgaagcaggagaatcgctttatctcaggaagcagaggttgcagtgagccaagatcatgctgttgcattccagcctgggcaacaagaacaaaactcactccatctcaaaaaaaaaaaaaaaatatctagagatgggagaatcatatggctggcataaaaaggtcaagtcaaagatatgtaagattaaggctttacgatgctccagttctagtaaaacagaccaggtacttgttttggtgtgaaattgccaatataagtatagtactgtacatattagttgtttagcttaggtaagtcttttaatctctttaaactccagtttcctcatctataaaataaagagaatatctactttgcaaacttgttgtgagagtgaaaagtaatgcatataaagtccctgtatggagcaagtactcaataactatttgttgaactaaaaatgataatactgatattcaccatttattagcatccctatgtgccagacactgtaaacaattaaaagttatcattctggtacccagagtacagtatgagacagacatgcaaaaaaaaaaaaaaaaaaagataatggagatctgcatagcataagatgcagtgggaccaaacgggaaaaaacacctaaatgagcctggagaaaggaagaaatgatagaggtggtgatgcttgagctatgatctaaaggttgagtagtagcttgtcagacagtaaaggggaaaggacagggcagggaggggccattgcaagaaattccatgcagagggattatggtatttcattatcactgaaccttaaactgtgtgtgtggccgggtacggtggctcatgcctgtaatcctagcactttgggaggccaaggtgggcagatcacttgaggtcaggagtttgaaaccagcctggccaacatggtgaaacctcatctctattaaaaatacaaaaaattagccaggtgtggttgtgggtgcctgtaattccagctacttgagcagctacttgagaggtcgaggcaggagaattgcttgaacccgggaggcagaggttgcaatgagctggtgtcaggccactgcactccagcatgggcaacagagagagactccatctcaaaaaaaaagtgtgcgtgtaaaacagacagtctttgtaggagatgaggtgaagcaagtaggcaggagttagatcctgagttacctttgggccaagccaaggagtttttattttattccatatagatgacagtcactgcagaaatttgaactgatatgcatatatcatgaggtttttttgttttagaaatattattctgtcagtcataagtgaagggactggggacattgggactggaggcaaagagatcttatctctttgcaatagtttgaaagctattgcaatatttgaagagaagattgataaatgcttgaaccagcacagtggcagtacagatggagggagctgactacaataaaatcatcaggacttgttgattgacatgatataggaagtgagggacagggatgagtcaaggctgatccccctagatcctgactaaggaagctgggtggttgacagtgccattcacagagacagtgaattctggcataaacacctaataggtcaggctggtttacacctccatcattcccatgggagaaggtatagaggggtgtgtgtttgtgtgtgtgtgtgtgtgtgtaaaagaacacagaaagccagattcctctttttgacaccagaatattggttcccaccatagtcaaaaggatattcctgaggatcgaggcttggaaaaatattggggaaggataagaactccagttgttgctgctttttttggcagccagtgtaacctaggtaaggacttggttgaattaagaaatttcatgtccagatcaggatggatttttctatttctctgagctctggtgtgtttcccactcagattgcaggtcgtaggtacctacggtgtgaattgtgttgtgtttctgtgcttgtgcaagggagtagctaggttgctgggaggtctggatgagggtgggggtggggtgagatcaagtctccagctccaagaggtcccctggggctaagtgaaaagcttgctcttttgaaatggtcttcgttggtaattaacaaaagatcaagaataccttggtgtcagataaagggaatttgtaggcacaatgctgttggtagctgatctcaatcattcaaggaagctattaaatctatgaacattagcattctgccaggtaaagagatctggtccttagcacctcccagacacactgattctttactgttttgaaacatctccctctcctggcttcctccaccccgcttccatactgtccttgaaatcaatgaatggtaatttagtgtatctagtgtatcactagcaaatgtctgaataagaaaggtttggtttccgctgtgtctcctgttacaatgagaacatgtactgcataaatttaattggctacgttaatgtgtaagccttttctgcaaagagatggatccgtttctgaatattctgcagaagggcagagttttgagtatatggcagtggttctaattagcagttgctccaatacaatcagactgagacggaagctactcatttagaatactggttgatgacaacactggcttgaacaaagtgaccactctccaatggctactctccctctcagtgggccgcaggttgctagggctcaggctgtggctgttttccccgccgaaaaggggcggggtcagtcggtgtgttaggaaaaaaaatgtatatatatatatatgttgtctgcctccccacagagataacaacccgtggaaaaacatgccgttgagcgggaggaaggcgaaaagataggctgggttttttggggggtgggggagcgtggaggatagggtgggctttttcccctccaatgctgcgacgcattaaccctgctgctgttgggacgttctctgctcagcctattggctgagcccgggagccgctgtctgccaatcgggtggtgaaaggcagacaaatctaccccgccaccagcaaaaacggcgcgtaacccttgcggcgccggccgaaccgcgccagagctggcgcggggaaagggagataggtgtctccagctgctgtggctgtttggggcgggtcggcttcatccgcgtctcaggagcaagtagagaattagcgggcggcagcaatgctccgcaaggtgagaagctggacagaaatctggcggtgggctacccttttgttcctcttttaccacctgggttacgtttgtgggcagatccgctacccggtcccagaggagtcacaggaagggacttttgtagggaatgtcgctcaagatttcctgctggatacggacagtctgtcagctcgcaggctgcaggtcgctggagaggtgaaccaaagacacttccgtgtggatttggacagcggagccctgctcatcaagaacccaatcgaccgagaggcactgtgtgggctcagtgccagctgcatcgtgcccctggagtttgtcaccgaaggtcctttggaaatgtaccgagcagaggtagagatcgtagatgtgaatgatcacgccccccgttttccgcggcagcagctggacttggaaattggggaggcagctcctccaggacagcgtttcccgttggaaaaggctcaggatgcagatgtggggagcaattcgattagcagctataggctgagctccaatgaacactttgcactggatgtgaagaagcgcagcgacggcagcctggtcccagagctgctcctggagaagcctttggatcgagagaagcaatcggactaccgcctggtgctgactgctgtcgatggagggaacccgccgagatctggcaccgcagagctccgggtatccgtgctggacgtaaacgacaacgccccagccttccagcaatccagctacaggattagtgtgttggagagcgcaccagcgggcatggtgctcatccagctcaatgcctcagacccggacctgggtcccagtggtaacgtcaccttttatttcagtggtcatacccctgatcgtgtaagaaacctctttagcctgcaccccactactggaaagcttactcttttggggcccctagactttgagagtgagaattactatgaatttgatgtgcgggctcgcgatgggggttctccagccatggagcaacattgcagccttcgagtggatctgctggacgtaaatgacaatgccccttacatcacagtgacctcagagcttggaaccctccccgagagtgcagaacctggcactgtggtggcacttatcagtgtgcaggatccagactcagggtcaaacggagatgtgagcctccgcattcctgaccacttgccatttgccctcaagtctgccttcaggaaccagttctccctggtgactgctggacccttggatcgagaggccaaatctagctatgacatcatggtcactgcttctgatgctgggaaccctcctctcagtacccacagaactattttcctcaatatttcagatgtgaatgataatccaccctctttctttcagaggtcacatgaggtgtttgttcctgagaacaatcgcccaggggacctgctttgctcccttgcagcctctgacccagactctggcttgaatgcgcttatctcctactcactcctggagcccaggaatcgagatgtatcagcttcctctttcatctctctgaacccccagacaggagctgttcatgctactcgatcctttgactatgagcaaacccagacactgcagtttgaggtgcaggcccgggatcggggcaacccaccccttagcagcactgtaacagttcgtctatttgtgctggacctcaatgacaatgctccagctgtgctccgtcctcgggcccggcctggttccttatgtccccaagcactgcctccatcagttggtgctggccacctaatcacaaaggtgactgctgtggacttggattcaggttacaatgcttgggtttcctatcagctcctggaggccccagatcccagcctgtttgcagtctctcgatatgctggggaggtgcggacggctgttcctatcccagctgacctcccaccacagaagctggtcattgtggtaaaggatagtggtagtccaccactctctacctctgttactctcttagtgtccttagaggaagacactcatccagttgtcccagatcttcgagaatcttcagctccaagggaaggagaatctcgtctaaccctctacttggctgtgtccctagtggcaatttgctttgtctcctttggctcattcgtggcactactctctaagtgtcttcgtggggcagcctgtggagtcacatgctttcctgctggcacctgtgcctgtctcaccagatctcgaaggagggaggggcttcccccttccaatgggatcctccgaatccagctagggtcagatgaccctatcaagtttgttgatgtgggaggccactctcatggctgtacacccttggcttctgcacccactcggagtgatagcttcatgatggtgaagtcacccagtgcacctatggcaggggagcctgttcgcccaagctgcccaccctctgatcttctctatgggctagaggtgagacctttgcaggctcaacaaatgcttgagggttattctgatccaggcatatggctaggccatgtcctagagagtactggcctctcagtaagtgcccatagtgatgtcaccatttttgtaagaggtaactatgtggtagacgctgtgctttgtaactgtttcgtgaattaaccagagttgtcacagtttagcattgggggcgggtcatgcctatatctgagtaagaaatgaaagtaattggtgatcaagagccaggctgttgtggaagcatgatgatggaatgtgggagcacaggaggctacagtgcacagggtacagtgcaccaggcagtcacttggacaaaggtggctgttttctctactcttcctgaaagaggggatcagattctgaagtaccttaactctaggttaccatttcccaagggattgaggggaaataaaatctttgtctcccagtatctagtacactgtgaagggacctctctatttgaaacatagagacagcagaaagaggagagaactaaaggaatagagaggcacgcatcagagtggtggcatagatcttttggtctgggtcttaggactcatatcaagtccctactggggatttgaactagatgcggtaaattggaaggttggggcgggttggtcatcacctttggaaaaaacagtaagtgaaatcacttatgtcagaaaactggtttacagttggctgattcatagaaacagccaccctgtgcatctttaagttgagttctcctgaatttggtgaaaccatgaaacctagaagccaagccatccatgcttggcctctgaccaccctcctgggtgacctgattcagccccagaaatgttcccctacccaaaaactgtaacactcattccacatttggggtctggggtgtcagaaaagctaagtcccatgtcagctgacattgagatttccgcaaagcattgctggagagtcagggcaagactttacaaggttcttactaatcttttctctcaccttagcagcattcagcaggatgggggagggtgggggaatacatgggctttgcctctcccagaaggacaagattttgctggttcaagcaaagtggtggaagcttctgaagtcatgcaggaagttgctgggacagaacgctgaggagttttgtatcactttgtcttccctgttgagtaccatctgagctgtcaaactttgctgccaagggggctgaatcaacctgcagcacgaagtgagtggggaggtaggaagcttctgtgacacagatttgcagcctgtgttcccaaggtttccaggattgaggaaactccataattggttgagagcacacagactttttggccaatcagactcagagctgaggtgggagatctgctcttccagcccgcctctcctcctccagctccccagctccactcaaattcagctcccctcccccctgcccacccccgccactcggtgactaagaactgctgcaagcaggcaaacctccgagcagtttttaagaggctggaaggagacataagagacttcagctgctgcattccaagccctgggtctaccttggagacaggacagcacagacttactctccacaaagggacttctgggtcatggggcccaagacactcccacagctcgctgggaaatggcaagtgctgtgcatgttgtccttgtgctgctggggctgggtgtctgggcagcttcgttactcagtggtggaggagtctgagccggggacgctggtggggaatgttgctcaggatctgggcttaaagatgacagatctgttgagccggcggctgcaattgggctctgaggagaatgggcgctatttttccctgagcttgatgagtggtgccctggcagtgaatcaaaagattgaccgagaaagcctatgtggagccagcaccagctgcctgctgccagtgcaggtggtgactgaacaccccctggagctaatccgtgtagaggtagagatcctggatctcaatgacaactctcctagctttgccacccctgagcgagagatgcgcatctcagaatcagcagcatctggggcacgattcccactggacagtgcccaggatccggatgtgggcaccaatactgtgagcttttacactctaagccccaacagccacttctctctgaatgtgaagaccctaaaagatgggaagccattcccagagctggtgctagagcagcagctggatcgtgaagcccaggcaagacatcagctggtgcttactgctgtggatggggggaccccagcccgctcagggaccacccttatctctgtcatcgtgctggacatcaatgataatgctccaaccttccaatcctcagttctacgtgtgggaatcccagagaatgcacccattggtactctgctgctccgcctcaatgccactgatccagacgagggcaccaacggccaactagactattcttttggagaccacacatctgaggcagtgcggaacctctttggcctagaccctagcagtggggcaatccatgtgttgggtcccatagactttgaggagtcacgtttctatgaaattcatgcaagagcccgtgaccagggacagcctgccatggagggccactgtgtgattcaagtggatgtgggggatgtcaatgacaatgccccagaggtgctattggcctctttggccaaccctgtcctagagagcacaccagtgggcacagtagtggggttgtttaatgtgcgagaccgggactcaggtagaaatggtgaagtgagccttgatatctctccggacctgccatttcagattaagccttctgagaaccactactcgctgctaaccagccagcctttggaccgggaggccacatcccactatatcatcgagctgctggccagcgatgctggttcaccttccctacacaaacatctcaccatcaggctcaacatttcagatgtcaatgacaatgcaccccgcttcaaccagcagctttacactgcttacatcctagaaaaccggcctccgggctcccttctttgcactgtggctgcctcagatccagacactggggataatgcccgcctcacctactccattgtaggaaatcaggttcagggagccccagcctcctcctttgtgtatgtcaacccagaggatggacggatctttgcccagcgtacctttgactatgaattgctgcagatgctgcagattgtggtgggggttcgagactccggctctcccccattgcatgccaacacatctctgcatgtgtttgtcctagacgagaatgataatgccccagctgtgctgcacccacggccagactgggaacactcagccccccagcgtctccctcgctctgctcctcctggctccttggtcaccaaggtgacagccgtggatgctgatgcaggccacaatgcgtggctctcctactcactgttgccacagtccacagccccaggactgttcctcgtgtctacacacactggtgaggtgcgcacagcccgggccttactggaggatgactctgacacccagcaggtggtggtcctggtgagggacaatggtgacccttcactctcctccacagccacagtgctgctggttctggaggatgaggaccctgaggaaatgcccaaatccagtgacttcctcatacaccctcctgagcgttcagaccttaccctttacctcattgtggctctagcgaccgtcagtctcttatccctagtcaccttcacctttctgtcagcgaagtgccttcagggaaacgcagacggggacgggggtggagggcagtgctgcaggcgccaggactcaccctccccggacttctataagcagtccagccccaacctgcaggtgagctcggacggcacgctcaagtacatggaggtgacgctgcggcccacagactcgcagagccactgctacaggacgtgcttttcaccggcctcggacggcagtgacttcacttttctaagacccctcagcgttcagcagcccacagctctggcgctggagcctgacgccatccggtcccgctctaatacgctgcgggagcggagccaggtgaggggctcggcgccgccccgggcgacccctgggggcggcactggagaagccgcccgtcctcataagggattgaacttgcatccactcctctccggccggcttggtcgctggctgcgctccacccgattctcgggatcattggaccgtttgcgcgaaaccagagtggccgattaagggatggggctccgagcaccgggggtggtggcgactgtgggcgaggggaggtgggaccgacccccacccctacactcaaaaaaggccggggcctccttcgagcttccggtgaatttcgggcgatttccgcgggtgtcgggggtcccgggaggaggcagtcacagatccacccctgcagccagcctcctaggcgccggctccggcacgcttcgccggtctgtagatttcctcttcgatttctccccagctcccagcatctgtgacttcactgttaccctccctatccccgcatcacccaaccgcacctgtctgcgggacttaggtgtgcgcgcggggctcatgcgtgtcctccctgctggccacccccacggcccacacaagttgcacgggctcgccacgccccgccaacacgtgcgcggacgcacgcacgcactcctcgcacgtgggcttacgcgaataccagctttcactgccactcgctcgcggccagattcacaggcctgttccggtccactcgcagctcccctctgccgctccctccgccgggctcaggagtactcgtagctgattgtgcgcgcctgagggtcccagatcgcggccgcccaggaccaggcgaggactccggagcctcctctcacctctcccacctgcgccccgggctgggccgggtcgcctggggggcggcctgagcgaggcgcggggccaggagcgctggagcgactgccgctctaagtgccgggcgggcaggactctacgatccttgggccagaggtccggatggtcccgggactccgtctcaagggtcggcgacccctcaacccagaagcctcgagcaggcggacaggcagagctgcccagtggccgaggcgcggcagggctccgcgttgggcgagtgagtgagcctctataggacagcaggactgggactccagtggcaccagcggccccttcctcccgcaggaagtgaaagcctcgagcgccctggctctcaacccccagagatacaggcttttggcgccgtcgtgatcacaatgtgcccagcgatctagggtcagagatttggaggtgaccaaactatctgacactctaacaagtcctgtctcctctggcagatggaaagctataggctctgccagatgccagggtgcccttatgtgtgaggaaactacaatagtaaaaaacacaagtttctccaactccaggagcttttattcaaaatatatcaatgcctaactctgctcctaggactgtattttgaaacacccccaggtgattttgatagctgattgagagaaacttactatataactcctttgagaacctcatctcatttgctcttcccaccattgctgttggctaggtactaacatgcctctcttataacagcttcacagaggtcaagtgacttgctcaagttcacagagcaagtaagagagattctaacccctgtctaactccagaatgtgtgcttttaatttcttggcacttggaactttaaaagcttgaggacaggagaggggagttgcctctgctgggattttgcttctgctgggatggggcaagggtggggttccttcccttttaggaccttacatgtggggaaagtcttctgtggctcctcatttctgagcagtccccgcagcgcaaacttggccagttatccttttggagattgagttcccccagctccgtttcctcctatcacaatcactgcatttccatgtagattctgctgtgtctaagaatacagtggctgagggctggccatccctgtgcccttctccatggcagccccagaatggtgctggtgactcccgatacacctggaatgctaggtttctgggttctgctcatatcactgccacctgtgagccttgagtgagccactggcagttccggagcttccttctccctggagtaatctgagatactcacactctctgcttctgggagcaagtatgagtattaattaccagcccaccccagaaccagtgaggaggtggctctaggagtgctccatgagagtgtgtgatgggataacacaccccctggaaagaccagaagggactcaggaatgaagtggctggccagagccccacaccttcagctaggtgggagatggctacacatcagccccttgggagccctggagacttagttggccctgcttggaggctgtgggagctggatccctccccgctgcatcccttccatttttctccgtctcagacagagcagccttgttctcttctccttagtcacagaccattgtctggcacggagttctaggggtgagaagtgtcccgggacttggatgccccgcaaaggcccaatctggcatgactcctaaattaataatgtatttagctgtgggaagagattcttgcaagccaagggcccagagaagatgtccctgtgaatgtgtcactgcacaacctggcaccaaaagggttaccaagaacagcagccatcttgctgcagaggatgctttgttcccagctgaggagttgaataaattcattctagggctggtagaattctcattgaaaagcctcctttgccactttagggggctttgtctgcacctcttcccccagttccacagaagatgccttcagtccttgaattttggctcaggagttctgactctgggggcagggaggaaggggccatttctttaggaaaggagtctcagcttgctcactgtggtcagatgaaatgtgatttatctcttggtttctggtacctcagacctctgagacctgaggtgtattttgtctttggagatgagtccacccctgccccctcttagtccgttttcttctctgtgcccactcccctccttctctcccggcccatccctaggggctcgggtgacattctaacttctcacgggtactcagcccctttccctctgttttctccacagcaagccccgcccaacacggactggcgtttctctcaggcccagagacccggcaccagcgggtaggtgactgattctccagcccaccctcttctctgcggcattttctcagggatgacgtgggaggagatgggggagggcccagcatttgctacagatggcttctccctcagtttgagatcccagggaggtcttggtgtgcggggggctggcacacagaccccggaaggaagaggcgactgccctgactgttcaggaagctcaattcacatgcttgccccttccctcctcgccacgaccggcaccttttcctatcccctgagggcactgtggaaccaaaggatggtcttaagctggtctctgggtgaaagcgaggctttctatgcccatgtactgcctaaccccctcccctgagttgagctgggctccattatgacctggggctcaggcagaaaagcatttgaccggaggaggcggtccgcactcagcgcctcctccagagcctccagagccgaggctgactgcagcctggggagagtggaggcagcacagctggaggtggaactgaggaaggactgggcggggcatggagcaggcccccttctccggcccctcctcccactgtcctctgcccctacttgtcctgctctctgtctgtggggtctccgtgtctctgcccctttttcttgagtttccgtctttgccactttctcttacctctcagtccttccctcagtctctatctcgctttgcaatctctgcctctccctctcttctccatctctgtcttagcttccgtcttgattgctgcacctcagcctcagtccctttcatttgtctacttgcattgatctgtgccgcccactgtgcctgccatggcataagtgctcaataaatgtggagtgagtaactacacgggacccttagtctctttctccttctctatctctgcctccctgtccttgtcctggacctcttttctgtttctcctttcaccgtttcctagcgccttgtgttcttctatccccagcctctatgtttctctgtctctcactatttctgctttcctctctgttctttgtctctctttgtctctgtctctgtatatctttctttgtctctgtctctggtctctgtgcctgttgtctttttctgcctctttctctgttactctttctttatctctctttttcttttatcttgtcttttttctctgagcctctgtctctgtctctcatttttttgtgcttgtgggcaagccagcacacacaaccccccacccaccacccaccaacaccccgctctcttccttccctgcccctcacacactgagcctttgatcgcagctctccaccagacaccctcccatccaagcagccccagctgctcatttcaatctggtatgaattcctgctgagacaggaaccccctgcgggctgaaggggagggaaacttcagcagaaagaccttcagttggtctgagcagagtgggataggctctgcgccaggcctcccagttagaagtcaggagcctggaggagtctcagagcccagggagagaagcaggagcttgggccaccttaccctacctcctcaatggttgagtacttgctgtccacatttgccaagttgctacagatgctgagcttccaagagttatctttcccccatcctgcaaccaaccaaacccttgttgccacaaggacccaggagcccttggtgtatggcagagattccagcttctgggcatgcacagtcctgtcacccattttaggaacgcaaagcgcttcttagaaggcccctaaaaagcagcagatcaaaaggcttgggctgcccttgcccttcctttgaccccagctgttgtccttctccctgctggccttgccaaccttctcataagttatccattaagtcattaatgtattcattcgttcatttattcaacaaatatttatcgagcatctactatgagcagggccctgtgctaaacattgggctataggagtgaacaagtagatgtgatcccagaactcataggcttccagaccagcagaggagactgaaaatttgcaacaagtaacacttaaaaaaaaaaaaaaaggctgggcactgtggttcacgcctgtaatcccagcactttgggaggccaaggtgggtagatcacttgaggtcaggggtttgagaccagcctggcagccaacatggtgaaaccccatctcgattaaaaatacaaaaattagccaggcgtggtggcaggcacctgtaatcccagcgacttaggaggctgaggcagaactgcttgaacccggaaggcagaggttgcagtgagctgagatcacgaaaaaaaaataatctagccacaaatcacagtaagttctgagaggcagagaacaatgtgagtgtaatgggggggggaagatcagagaaggcttctaggaggaggtgacattgagaagttctaggccatttatgttccctctacctaccaccaccccaggccatacactggctttgaagcagaattcaccattgaacctggaagccccaccaactgcctctcatgtgtcctctggggtgagcaccttacccctgcctcaactcccattccatcaaatgagaggcttagtggcctggaatacatgtgggagctcttggagatatggaggagaaggtgcggaacctctctctctctcctctctctgcttccttagttaacttgtggaggatgcaacaaaccttttttttttttttttttagacagagtcttgctctgttgcccaagctggagtgcagtggtgcgatcttggctcactgcaacctctgcctgccaggttcaagcgattctcctgcctcagcctcccgagtagctgggacagcaggtgtgcaccaccacacccagctcatttttgtatttttagtagagatgggtttcgccacgttggccaggctggtttcaaactccccgacctcaactgatccacctgcttcagcttcccaaagtgctagaattacaggtgtgatcgcccccggccacaacaaacatttttgattcagcggctccaaagtgaaataagcgttaggatctagtccagtaacttcaacttctctccttcattcattcaacaaatggtcagtgagcactttctgttggccaggcagtgttctcgatgtgggaggcccctgccctcaaggagtttacagtgcactgaaggagacaaatattgaccaaataattacaaaaataaatgtgagactgaaactgtcataagtgctaggtagaattgtatctggtggtgtgggcgtataatagggatttgatttagggagcaggaggacatcctggaaatgaagttgtgctgagatctgaaagacaaatacaaattaaccagctaaagaaaagaaggaagagcattccagatggtcaggcataccagcttcaaagcagggctggtgttgagttcttcagtaaacttggttcaagatcaagccagctctgggtcacactgcctacacagaaggaagagcattccaaatgggaaaagcctatgcaaaagccttgtggtgaggcctcctgggatcaagggaatggcagggagttttctctttgctggcactggagtgaggggatgaagaggagaggttccttttatccagtctaaccctggttccagccttctgttgatgccctgcctcactccctccccaccatcttgcccactgccctccagcctggtctggtcagacacaccagcttcaaagcagggctagtattgagttcttcagtaaacttggttcaagttcaagtcagcactgggtcacactgcctagacagaaggaagaagacctggccaggtgtggtggctcacgcctgtaatcccagcactttgggaggctgaggtgggtggatcacctgaggtcaggagtttgagaccagcctggccaacatgatgaaaccccatctctagtaaaaatacaaaatattagccaggtgtggtggtgcacacctgtagtcccagctactcaggaggctgaggcaggggaatcgcttgaacccaggaggcggaggttgcagtgagctgagatcacaccactgcactccagtctgggtgacagagcgagactccatcaggaaagaaagaaagaaaaagagagagagggagggagggagggaaggaaggaaggaaggaaggaaggaaggaaggaaggaaggaaggaaggaaggaagaaaagaaagaaaaagggagaaaaaatgaagaagacttacattctgaagttcctgcttggcacatgcttctcctccccaccactatcccttctcaggtcatcctttgggtgtctgatcccaatagctgttgtctcaagctctgagcccagcaaaccatttcccccttcttaggctgtaacccaggccctgccctgcagctgtccccagcctctgcacaaagagtctccatttggtccctagactgttctctgatggctccacactaccatccctcctctgagagacagtatccctgctctctctcagtttgggcagtcattcaacaaacaaatagcaacttaatttttttccacttataaaatagtacatgctcattatagaaacatgaaaaatagaaaaaaaattaaaaggaaaaccacccatcattttacaatctagggagaaccaccaccaactacagtttaatatgaaacatttcaaatatgtacaaaagtagagagaatggtgtcatgaacctgtatgataccactatccagcttcaactaatgccttatcttgtttcacctatatccctacccttatcctgtccttggattcttttgaagcaaatctcagacatcatataatttcatcttggtctccaccatctttaacagatgacttttttttttttttttttttttggagacagagtctcactctcttgcccaggctgtggcacaatctcagctcactgcagccttcgcctcccgggttcaagcaattctcatgcttcagcctcctaagtagctaggattacaggtgtgcaccaccacacacagctaatattttgtattttcagtacaaacagggtttcgccatgttggccaggctggtcttgaactcctggcctcaagtgatccaccctcctcggcctcccaaaatgttgggattacaggtgtgagccaccttgcccggccagatgattctttcataaggtccacattttatatttgagtgagtgtctcttaagtatcttaatgctcttttaatgtaaaagacttcccctccatcttccatttttgcaatttatttgttgaatccctgccttttcatatatatctttctaaacttttctttgtgtaatcaaagaacatgcatgagcttcatttttatttttatttatttatttatttatttatttatttatttatttattgatacgtagccttgctctgtcacccaggctggactgcagtggcgcaatctcggctcactgcaagctccgcctcccaggttcacgccatgctcctgcctcagcctccagaatagctgggactacaggcgcccactaccacgcccggctaattattttgtatttttagtagagacggggtttcaccgtgttagccaggatggtctcgatctcctgacctcgtgatccgcccgcctcggcctcccaaagtgctgggattacaggcgtgagccaccgcgcctggccgagcttcattttaaaaaaatctcattcacctaaataagttgttcacaaacttgtcacactttcatgtgacactttattcacatattaagaactgttattcccagtcatacggtacatttcctactagttttttaaaaatagcaactgaggccatactgtccaacagaattatagcttttttcttctttgcagtgtatcatgagaatttccccatgtctttcaaaattcttcccaagtcatttgcagagtaactcctcttatgaatatacatattattttacagaataagtcctcatatgaatatacatattatttttctaatgctaatgggcttttgctacattagaaaacatacacattcatttacaattttttttttttgagacagtctcgctctgtctccaggctggggtgcagtggcgccatctcggctcactgcaagctccacctcctgggttcaagcaattctcctgcctcagcctcctgagtagctgggactacaggcacgcgccaccacgcccagctaatttttgtatttttagtagagacggggtttcaccatgttgaccaggatggtctcaatctcttgacctcgtgatccgcctgcctcagcctccctaagtgctgggattacaggtgggagccaccatccccagcctcatttacattttaacacaattaaattcagggtgttgtcagggtgacttcctagatttctcagttttttgagcatgatgtagggagtattttattatagtccagtctatgggatattcccttatacacacacacacacacacacacacacacacacacacacacacaccccaaactcaatagggcaagaaccatattcatcatctcttaaatcctaggtcctgtcacaggccactgcttggaaaatagttgactaaatgtagtccatttcttccatttttacttttcactattccccaaatcctggaagagtccctcatatctgctgctggggctccaaggcctccaagctgaagcccagtacgttgttgtgcataagatcataggccctggaatcatattaggctggctttcaggttgcaactctaccagttccagctgtgtgactctggtatagtctctcaacctctctgagccctgttttcatctgttggaaaatatagataatcacaacacttatctgcagggtgattccgaggataaaaaagacaaatatattacccagtcagcttagaataggaagctctcagtaaatggttaaaaaagaggtctctctccctctgctcatctcttacccagcttcacataattggcagcccacccacctgtttggccctcaaccttcaaccatttcccaggacgcctccttacactcctgatcatcatggttccaaccccactgttccactcagctttgttccctcaacaccactgctccctgtgacaggtcatcctcctaacctctggcatctggtcccgttgtctccctgacaacccgcatgctctcctccctgcaacccccgccgcttgcctgctctccctactttattcccattagcccccttcacctggggctgagaacacctggccttgaccctgcaccctcagccaggcccacagagctcagtcgggccggaagtaaggaccccagatattcagttgaggaatttaacattaatacaataatatagaatccaccagcagattttcataaatgttctgtgtgttcttttatccttttttttaatccaggattttatcaaggagcatagattgcatttggttgtcacgtctttcctctcctttaatctggagccagctcccagtctttttatttttttaatgacatggatatttttaaagagtccaggccagttgtactttaaaatgtccccgaacctggatttgctggctattctctgatggttagattcagattacacaccttggtaggaatacttcccgcagcatcacactgggactcatctaacgtcggcctgtcccactatcagtgatgccgagtttgttcgtgtggtaaaaacagtgtcccagatctctccattataaaaatatatttttataaagatattttaaaatatttgtgaaaatataagtaatctgtggatgatactttgagataggcagcaacccttcatgcaattttagtattccctgatgatccttgcctgtatctgtttttacatcagtgattacaaagcggtgatgttctgtcattccttctacatgtatttgctggtattcttctgaaaattacctggatgatttcttcagatttaaattcactgtcttttccttggggaagcctggactggctgagctgcctaaccctgactctctgtcttttttttttttttgacagggagtctagctctgttgccaggctggagtgcagtggcaaccttcacctcctgggttcaagcgattctcctgcctcagcctcccaagtagctgggattacaggcgtgtgccaccatgcccggttaattttttttttttaatatctattttagttgagacagggtttcaccatgttggtcagaatggtctcgatctcctgacctcgtggtctgcccgcccctgcctctcttcataccctctggtagcccctgacacagcccatggcaagtatcacaattgcaattactctattgtgtaattatttaaaatcagcctctcagtgcccaccatgagcaccgtaaagatggacagtttctatcatactcacagccacaaccccagcacctggctctgtgtctggtacatagaaattgctcaagaaagaattgttggaggggcgcggtggctcacgcctgtaattccagcactttgggaagcggaggcaggtggatcatgaggtcaggagttcgaaaccaacctggccaatatggtgaaaccccatctctactaaaaatacaaaaattcgctgggcatggtggcatgtgtgcacttgtcgtcccagctgctcaagaggctgaggcaggagaatcacttgaacctgggaggcagaggttgcagtgagccgagatcgcgccactgtactccagcctgggtgacagagcgagactccagctcaaaaaaaaaaaaaaaagaaaaaagaaaagaaataattattgaatcaatggaaacagaattacaactcttcccacttttgggaaggagaattgagattcctgctttccccttcaaccctagctttatgtttgttgtgatggtatagaggtcacacatggcagccttgtgtctgttcttaggctgagttcatctacttagggacggggaatcccagattgggcaaaaccaaaagcagggacagaccttggaaaaattgtaaagcagttcttggttgtgctcacccaccatgacaaaatatgcacacacacaacgcaacacacacacagacattttcatgccttcaaggcctaccctacagcctttcccatggtgccaaacccttcttcttaccttacagtcacttaactgtctctgctggtctcttcccactcatttaggcaacaaatatttattgaaaaacttctctgagccagatggtgccaaacagttacctaaagggcagactgtgtgtgtgccagggctgtttcccgccaacactcccctgcaaattgaaataatttcatccttggaaattcaaaaaaatcatgaaaattgtcactgtgggaaaattccaagtagagctgaaccttctaagaagcagagagttcttcttatggtttagtatttttttaaattatgaatcatttcatgttttttcaacactcggagtttctaaaagtctcacttaggtccaagtgctaggctttgtgctaggtgcttcagtaggaagcaggtggagtcgctgcctcacagaagccagtgtggtggaggaacagacaggcactacaacagctgcagtgtgactagtgccatgtggggcagccgctgggatgggagtacagtggaggcacctgcccagtctgagtggatctcctctgatatattttattcgtgtcatcatggcaaatgttgggggactggcattctagggaacaccatctgcccaggattcacagcaagagggaacttgagggataggaaagtgcaccttggaaaaggtttgatgatagagtgtttgagggcggggggtgggggttcttgtaaaataggaggggcaggttcttctatggccgtggattttactctgagggcttaggaagccattgaattttagaaatttcttctccctgctccagggtctcttggggcctcctacatctccccctaggtacctcctaggtccccactttttctctagctctggaacattctcttccatttcccaccttcacagtcctctggagaaggtctgatctccctcactatgacaggaagccaggctctctcatggtgggtgggggaatgcactatgttcaatgcattggaccagcctggccaacatggtgaaaccccgtctgtactaaaaatacaaaaattagcctggcacagtggcaggtgcctgtcatcccagctacttgggagactgaggcaggagaatcgcttgaacccaggaggtggatgttgcaatgagccaagatcgcgccactgcactccagcctggatgacagagtaagaccctgtctaaaacaaaaagaaaaaagcatcggaggcagcaaagagctggtttgagggactgacttgtgggattctggcttctgaaggattgtagaagtgcctcctaccttgctgagagaaacaggtcttgggcatggggtagggttagggtactaggtttgggagccctgggagaggacaggaggggcatgagctgtgccggcctgggagtctgtgctcaccatcctactctctccccagctcccaaaatggcgatgacaccggcacctggcccaacaaccagtttgacacagagatgctgcaagccatgatcttggcgtccgccagtggtaagtggtgtcagtgtgtgtatggaagagtgggagacctggggttctggggtgcatctcacagccaccatgcccacggactggatgtcaaacctgtgtagtttctccagatctttcggcaggtctgaaaggacccacaattccaaacataaagcctggaattgtggctaaggaacagcagaggggttgggggtcctgggatgcctggaggagagcgaacaaggaaaagactcatggagggaatagtggttacaagtctagctctggaatgggacagtgtagctcaggtcctagctctgctactatccttgggacttggatcgacttgctcaatctctctaaacctcagtttcctcagcctagaaagtggggacagggaccccaaagggttgttgtagagattaaatgagatgataccacaaagcatagagttctgggcctggcgcttggaagccctcaagcaatgaaagtgggtgtagaaatccccagccgagagaacacctcctctttatgcgaggctcctcttttgctgcccctaactccagagtaggattctggttttcccataaggttgactaagggcttcctttgtaatagagattcggctagtggtggttgtccctgaagagtcactagggcccagagcaggagaagaagaatatcatttgtccttaagagcacagcctaagctgggcgtggtggctcacgcctgtaatcccagcactttgggaagctgaggcaggaggatcatgaggtcaggagttcgaaaccggcctggccaacatagtgaaaccctgtctctactaaaaatacaaaaattagctgggcatggtggtgcgtgcctgtagtcccagctacttgggaggctgaggcaggagaatcgcttgaacctgggaggtggctgtggtgagcagaaaatcgcaccactgcactccagcctgggcaacagtctcgctctgtctcaaaaaaaaaaaaaaaaaaaaagagcacaggctttagaggcaggccaatctggattcaaatcctggcacctggcaccaccacttagcaatgagtccttaggtaagttattaaaccccctcggtttcacttactattaatgggcacagtattaacggatctcattgtggtgttaccagggccaaatgcaagtccctcagcacaggattggcagagagtaagggcacaatatattattatctttgctgacccaaacccgttttttactgggtagaaagcagaattagaataatgcctattaataaagactagcttctggagcagcaaatcctgggcttataaggaggctggcagaggatcaaggcattgccctatatcatgaactgatagccctgccctccagcatgtctggaggactggtgggtagagaaccaggtgaaatcacaagaagcactgtcatcacacctgggcacatactaaacaaactttaggggcctcctgtcaatgaatcctctcaatagctctgcaaggcaggtctgatttctcacactcgacagatgagagaaccgagaaggcacttgccccagggtcctcagttttgagctgccaagctgaggttctaacctggctcaactcctaagtttatgctctttctactatagggaccatggctgcctttggatccagcctcggcttctctattacctgagcaggatgagaggctgtcctcttcctcgagctctgctttattcttccagatcagggttgccagataaaatacaggatgcccagttacagttgaatgtcagataaacagcaagtactatttcagcataagtcagtctcaaatgttgcatgagacataatgtactaaaaaaaaaaatgctcattgtttacctgaaattcaaatttaactgggagccctgtacttttatttactaaatctggcaactctaccccagatgtctgtgaggttaagtggggccaggcctacagctgacggaaggacagagagagaggtggcagggactgctggcctcctgaggcagagctgtcccaggtctggtggggctatgattccagagaggccagagactgagtatgaaagtggcaggcggctgggtctgaggagatgccaagttggcctcttgagggaaataaacaggtatatttagctgttgtggccttgcgccctgaggccaggaagcagctttttagcctaaatccagatgttaaaaacagaaatgaaatcagtatttatggccccaaaccctccaagcaagtcatgcagctcgttcccctgtcaaggcctcccacctttggcccacacagggcctgaccctcgtctaagcctgcgccctggggaacggaccctgggggtggaggtggtgggtcaggccctgctctcactttcacacccgcttcctagccctgaaaccagagaggttcctgaagtccagcccagccaggcctgtggggctgctgagaggggttaagtaagagggagagtaaaaaccgacacttgggaggaggcttttaaaataaacatctgcggggagggatgctctcaaggaggctgcggtttgcagctcagccagctgtgttccagctaatcagcctccttgggctactctggagttgctgccttggccctgggatggggtaggttaagaggacagagggaggtcagggagctgggggctgagtttccctgagtagaggctggcacaggagagaaggcatcacccccacctcgtccaggccagaagatgtccagcttcttgaggctctcctaagtctgcctctcctgggaccaagagaaaatcccggtccttgaccaaggtgggccttggggggagtggggtgtagagggaggggcactggagaactgactctacagaaagtcaaagctggcaatccaacttcttcccctcagatttatagatgggaaaacaggcttgagccacgcagagacttgaccaagctcacacagttccttagtggcagagcagagcaaatattctctttcttttacattctggatttccatatcttctctccctcctggtccagcccaacctcagggcaccccccacgaggtgggcgggggatggctttgtcacttgcacccactcggggtgctactcagagatcttgggtgcacataggacgtgggtgggccgagcttctagctactccgtcaggcccttcctgtcattctgtctctgcctcccttctccctgcttctccgtgttcctcctcattcttttctgtgtgcagggagactacaccccccaccccgctctttctctggcgcctctgaggtcccccctctagcccctaaatcactctggaatcctggctctttgaagccagatctgggcccccctcccctaccccttccattcccaggctgggaaaggctgaagaggctgacggctggaggggagggggcggggcggtggcggatctggcttccttttggagttaattagggaaaacagagaaatgtcagcggaatgaaagggctgggggtgggggccagctggggtaggagaggaggaagtgggcagctgctccctcccactcaacccctctcccccgcccccagaaagctctcagctccggggatttgcgacatgaaatgggggctgtagaaacctgagcgctggtgcgtgaagagaaaaaccgaggcgcatcccggctctcccctcccgtgtgccctcctcctcttatgccggcttgaaaatatttcctgtctctctatttctcaatccctggttgatgtcccaggattactcagcctctccggctttagtcactctcgctacccgctcccagggtccagggtggaggcagagggaggctgggagagaagctctactgccagctgggcctgggctggcctgggcatccctgaggttttaactgtctcctaaccacagaggatctcagggcctccagcagcgagccccaatgagtcaaactcttgtttcctcctctcccacccccgacccagtcagggcaggtgaggggtagaggtgatggcatgctggatgtgacggtgttgatgatgtattgcacaggatgaagcaccatctcatttagtcctcacagcagccttcacagtgcgtacaaatcagctggcaattccgagaggctgcattctaaacaagttcctgggtgatgctgagccagggccagagtgtggacttctctgggccccagtttcttcttctgtacagtgggacgttggactggaggtgctgtctgatgtcacctagctgtggcactctgagcctgtgcctaaagtgtccctgagatgtctagtccccgagatcatcatctcctcagcttcatagagccgagctcttctccatcttctctctacctcccattcactcagaacagggataaggtccaagctgctggtggtgatggtgactgactgtcccttccagcatgcgcttaggtacacttgggcctgaatgcccctctaacaaatgctaccgggtatggccttggtccttctaacacttggttccctcatctgtaaaatgagggtcataccacatagctggctgggctgttatgtagaggttaaaagtgattgtgcatgtgaagcatccagcagagtgcctggcacacagtaggtgctcaaatgctgttttgaaatacaaaaattagctgggctagtggtgtgcacctgtaatctcagctactcaggaggttgaggcaggagaatcacttgagcccaggaggcagaggttgcagtgagccgggatcgcgccactgcactccaggctgggcgacagagcaggactccatcttaaaaaaaaaaaaaaaaaaatgctgttttgaaatggaggcttggaagagcactcttcacccccaccccacacacttactaacggaactaccgaatctctactcgtgccaggccttgcttggcaaaggctaggggcatgtaaagccatggtttcatggctgctgccctccaggagcccatggtctagtgtgggagtcagaggctcccttgagaaagccagggcaaggaactgagagcccgtgtcacagccctgagagaaataccagcgaatgtgttttgagcacttacatctaccaggcactattttacgtacctgacatacattttcttatttagcattcactaaaaccagaagaggtggttaccattatcatccccattttgcagatgagaaaactgaagtggcataaggaggttaggtagacttgcccaggatcacagtgagtaaggaaaggagctaggaatcaaacctagactttctcactccagagcctcttaacctctaccctcaactcttgtgaagagagactaccttggtgacccctatattcccagtgctcagcgtggtcaaggcccagggtgctgtataggcattcattaactgctggggatataagacagtgactgttgaggaccctaagtttagctcccacctgatcttcctctgtctctgcagaagctgctgatgggagctccaccctgggagggggtgccggcaccatgggattgagcgcccgctacggaccccagttcaccctgcagcacgtgcccgactaccgccagaatgtctacatcccaggcagcaatgccacactgaccaacgcagctggcaagcgggatggcaaggccccagcaggtggcaatggcaacaagaagaagtcgggcaagaaggagaagaagtaacatggaggccaggccaagagccacagggcggcctctccccaaccagcccagcttctccttacctgcacccaggcctcagagtttcagggctaacccccagaatactggtaggggccaaggccatgctccccttgggaaacagaaacaagtgcccagtcagcacctaccccttcccccccagggggttgaatatgcaaaagcagttccgctgggaacccccatccaatcaactgctgtacccatgggggtagtggggttactgtagacaccaagaaccatttgccacaccccgtttagttacagctgaactcctccatcttccaaatcaatcaggcccatccatcccatgcctccctcctccccaccccactccaacagttcctctttcccgagtaaggtggttggggtgttgaagtaccaagtaacctacaagcctcctagttctgaaaagttggaagggcatcatgacctcttggcctctcctttgattctcaatcttcccccaaagcatggtttggtgccagccccttcacctccttccagagcccaagatcaatgctcaagttttggaggacatgatcaccatccccatggtactgatgcttgctggatttagggagggcattttgctaccaagcctcttcccaacgccctggggaccagtcttctgttttgtttttcattgtttgacgtttccactgcatgccttgacttcccccacctcctcctcaaacaagagactccactgcatgttccaagacagtatggggtggtaagataaggaagggaagtgtgtggatgtggatggtgggggcatggacaaagcttgacacatcaagttatcaaggccttggaggaggctctgtatgtcctcaggggactgacaacatcctccagattccagccataaaccaataactaggctggacccttcccactacataatagggctcagcccaggcagccagctttgggctgagctaacaggaccaatggattaaactggcatttcagtccaaggaagctcgaagcaggtttaggaccaggtccccttgagaggtcagaggggcctctgtgggtgctgggtactccagaggtgccactggtggaagggtcagcggagccccagcaggaagggtgggccagccaggccattcttagtccctgggttggggaggcagggagctagggcagggaccaaatgaacagaaagtctcagcccaggatggggcttcttcaacagggcccctgccctcctgaagcctcagtccttcaccttgccaggtgccgtttctcttccgtgaaggccactgcccaggtccccagtgcgccccctagtggccatagcctggttaaagttccccagtgcctccttgtgcatagaccttcttctcccacccccttctgcccctgggtccccggccatccagcggggctgccagagaaccccagacctgcccttacagtagtgtagcgccccctccctctttcggctggtgtagaatagccagtagtgtagtgcggtgtgcttttacgtgatggcgggtgggcagcgggcggcgggctccgcgcagccgtctgtccttgatctgcccgcggcggcccgtgttgtgttttgtgctgtgtccacgcgctaaggcgaccccctcccccgtactgacttctcctataagcgcttctcttcgcatagtcacgtagctcccaccccaccctcttcctgtgtctcacgcaagttttatactctaatatttatatggctttttttcttcgacaaaaaaataataaaacgtttcttctgaaaagctgaacgtttctgtataagcgatggaagctcctggcatgtgtgcatgaagtgatgagctgaggtgggtgctggaagaagggcggaatcgggaggccactttgtgtcattgcgcgtctagatgtttccgaattgcgtgtgtgtgtgtgactgtgcaatatggttgtgtatgcttgcaatgccgttgtgcctatgagacagtgtgcgattgtgtgcctatggatctgtgtaccgtgtgccattgtgtgatcggtccgctgtgggggtggggatctgagtgcggcgtgtcagtgtgcagtggagtgtgcagtctaagcttgcggctgtctccaggcagaagaggagaccccggcgcgggcgggggcgggttggcgccgggcaaacgccttgggtagaggggagaggacgtttcgttagttcccgccccttcctgactaaaattgcctacccgaagcgccccggagggcttcacgggaggagggtagactctcctttgcccccgcacccccacccccgctgcctaggggttttgggaaagccgcgggagtgggagggaatgcgggaggtgattcttccaaagccaagtctgcagctcgagcctcagtttccccatctggaattcgccttcccgctgacatctccgtagcgaagcctaagaaattggagggctcatcctcttcttgcgggggtcaaggggactgaaaggacgtgcaggaaatgagatccatcgcagactcagctcccctccctccttcctgtcggtgcttttccactcactcgcctgctctcccatctccccgccccctccgcctgcctcctcgaagcactgtgggattccgaggttgctgcagccagagaagctgcagaaaaacacggagctgggggtgaagggggacttaaaaggggaactacccggaaggacccaagaacacaaagacagagccactgcggttatctggctggtcagcaagggtatgcggcttcctccgcgctgcggaggctcccagagccaggtcacccattctgccagctcaagtctgttgtcatgggaaccaaaccttccaacttaagaatctgggggcgactttctagcgtgggaggaagggtggtgtgcacggttgctgagatggaagcagggttttgttactcagagccaggctgcggaggggcggggtgccgggcgcctgggttctattccaggcacagcagcagactggcagagcgcgtgagcagctgtggtttgtcccctaattggtatgtgtgcctataaagctctgaaccagaaaggcgtggcctccggggggacgggagggaggcggcaggcaacccatccccacacctcaggccatactgaggaggcagctgcccaggctccagggctatttaaaaggcttttatttccagttccagagcccgcccgaatgggtttgtggtcctctccaggcctctccctgtctatcctgggcctgctcattgctggtctggcttttttgtgcaggtcataacg

SEQ ID NO: 457 - DNA, 98334 bp, Homo sapiens
  source 1..98334: mol_type = genomic DNA
gatagttgcagttgaatatactaagtttttcattaatattgaattaacaatttatttataacaatgtatgcttagatttttccagccctatttataactgataacactgcagtatcctttttgcatacaattctctaatttcacactgctatgtggaagatatagcattttaatttaactttcattgctcaatagggatcctgaggaggctatagagggtgaaattaagaatatttgggattctgcttttgtcttttttgttaaattttctagtgactaaggctgaaagtaaatatgggttgggaagacagataaatttgtacatgttcccgagaacaggagcaagagatatatgacaaagctatttcagtggctctttaatgtataaggaggcaaacacctgaaactctgaaaactctgaaattgagaggcaaaataaacttagagtcaagaaagaaatgccatttctgcagatcagaatataaacaccaaccacagctgtaaaaaagaaaagaatatatgcaacgaagggaaattatataaacaaaggatcattggaggtactgatgagttcatttagttcaatgaaaatagtgacgtattaggtagatctcttaattttattactagtattctactaaatgtggtagtataaagtcaaaaagcattccgaagtttctcaagacccttataattccatgatttttttcaggtcagtcaacatttgttgaatgataggtctgtggaaggaaagcacactctttagggtcatagttattaactattaaaccattgaaactattattttatatttgtgttaatgagagtcaaaattattgtgcattcatctcaaataattctattattttgaaaaatacaggttttttttttaaaaaaaactgctcttgacattgtagctattgtgagaaaatattttgattataattatttaaaagcaatacaggacaccctggatgatggtaatgactagggcaatggttgcattccagtacttaagtatgaaataaggaattattactttctgggtgaatataggctagaattgaagacaaaaaaatttgttgcttatcttcagtacttccagcttcatagataattactcttaaaaggaacaagaatgactgcctctggatggaggaattggatagcaatgggccgtgggataggagacctataaaccttcatgctatattattttgtgcctttttaaattttgaagaaaaaatattcatttattcaagatatatgtaaattcagtaaataaaaagatatgatagttatgaccaagtggaaatatatttcctgatgtaaaaggaatcactgaggaaaaagattaaaatattttggctgtcaactcgtagtttaaaaaaaattccttgaaagaggtagagaaaagtcaagttgcagtcccacacagagcctctgggcgccgccgtcggccagtgcagagcaagcgctgacgccggggatccctcagcctctagcctgggattccctgcgcagccaacaacagaaaagaaaaccagctcccacacagaggctcccggctgcgcagaccttgcccagcacaccagattgccagctccgagacccgggactcctcctgtcctgggccgaatgctcttttagcgcggtagagtgcactttctccaactggaaaagcggggacccagcgagaacccgagcgaacgatgggagggagctgcgcgcagaggcgccgggccggcccgcggcaggtactatttcctttgctgctgcctttgttctaccccacgctgtgtgagccgatccgctactcgattccggaggagctggccaagggctcggtggtggggaacctcgctaaggatctagggcttagtgtcctggatgtgtcggctcgcgagctgcgagtgagcgcggagaagctgcacttcagcgtagacgcgcagagcggggacttacttgtgaaggaccgaatagaccgtgagcaaatatgcaaagagagaagaagatgtgagttgcaattggaagctgtggtggaaaatcctttaaatatttttcatgtcattgtggtgattgaggatgttaatgaccacgcccctcaattccggaaagatgaaataaacttagaaatcagtgaatccgtcagcctggggatgggaacaattcttgagtctgcagaagatcctgatattagtatgaattcgctgagcaaataccaactaagtcctaacgagtatttctcattggtggagaaagacaatcctgatggtggcaaatatccagaattagtattgcagaagactctggaccgagaaacgcagagcgctcaccacttggtactgaccgccttagatggtggggaccctccccgaagcggtactgctcagataagaatcctggtaatagatgccaatgacaaccccccagtgttcagccaggacgtgtacagggttagccttcgggaagacgtgcctccaggcacctccatcctgagagtgaaggccactgaccaggacgagggcatcaactcagagatcacttattccttctttggtgtggctgacaaagctcagcacgtgttctctctggattacactacaggaaacattctaactcagcagcctttggattttgaagaagtagaaagatatacgataaacatagaagcaaaagaccgaggatctctctcaacacggtgtaaagtaattgtagaagttgtagacgaaaacgacaacagcccagaaataatcatcacgtcactctctgatcagattatggaggattcccctccaggagtggttgttgccctcttcaaaacacgggaccaagactcaggggaaaatggggaagtcaggtgtagcttaagtagaggtgttccatttaagattcattcttcttctaataattactacaagctagtaacagatgaggccctggatcgggagcagaccccagagtacaacgtcaccatcgcagccacagacaggggcaagcctccgttatcctccagcaaaaccataaccctgcacattactgacgtcaatgacaacgcgccggttttcggacagtcagcctacctggtccacgtgccagaaaacaaccagccgggtgcctccatagcgcaagtcagtgcctctgacccagacttcgggctcaacggccgtgtctcctactctctcattgccagcgacctggagtcacgaacgctgtcgtcctacgtgtccgtgagcgcgcagagcggggtggtgttcgcgcagcgcgccttcgaccacgagcagctgcgcaccttcgagctcacgctgcaggcccgcgaccagggctcgcccgcgctcagcgccaatgtgagcctgcgcgtgttggtgggcgaccgtaacgacaacgcaccgcgggtgctgtaccctgcgctgggtcccgacggctccgcgctcttcgacacagtgccgcgggccgcgcagccaggctacctggtgaccaaggtggtggccgtggacgcggactcggggcacaatgcctggctgtcctaccacgtggtgcaggccagtgagcccgggctcttcagcctggggctgcgaacaggcgaggtgcgcatggtgcgtgctttgggtgacaaggactcggtccgccagcgcctgctagtcgctgtaagagatggaggacagccacccctttcagccactgccacgctgcacctggtgttcgcagatagcttgcaagaggtactgccggatttcagcgaccatcccacaccctctgactcccaggctgagatgcagttttacctggtggtggccttggccttgatttctgtgctctttctcctcgcggtgattctagctattgctctacgcctgcgacagtctttcagccctactgcaggagactgctttgagtcagttctctgctccaagtccggacctgtgggtccccccaactacagtgagggaacgttgccctatgcctataatttttgtgtgcctggggatcaaatgaatccagaatttaattttttcacatctgttgatcattgtccagccacacaagataacctcaacaaagatagcatgctactggctagcattttaactcccagcgttgaagcagataagaagattcttaaacaggtaagtatttaaaaatgtatttaatcctttttatattacaatatgccaatatattccaatatagtggtattattttaagattctagataacttcttcatagagttcgcaaaatataggtcaaatttatggttatcattattaaaacaaaagtttaaattaaatgcctcagtcttcctactattcaaagacattttaaagcaaactacatgggtaatctccggtgacatttttatgaagtaaaatacctttcggttaaaaatataaaatacaggtatatttttacggcatggtattttaattgaaaccctgatgctactcaatttttctcaagtatttcatcttcatttactcaataaaggaaccttgtaagaattatagttaggcatcctacctgatgattttatcgggaccgtattatttccacttccagaaatgtcgttcctttcagtcggttaaaatcaattggaaccaactacaacctacaagttttcagctccagtaatattttgaaaactttttaaaaattaagcaagcccttttaataattactcctttcgcaggtgttcttggtaaagttttaacgtcacataatgtaagtattgtgtatcatcgtttttaagctctacaaatacgtgtgattcacaaaggtgagcgtaatcatttcttctggaatttcttagtcgttgcaataataagaatgggctctaggcgccgctgctcaccaatcagggaatgggaagctgcgcgccattgagtccctccctcccccgcctctaccacacaaagcggaatgagatggatactcacagatcctgacactggagacttagaagtattttccttcgctttctgatatattttggatgtagtcggcctaggacttcatagatacataagccgattcacaaccaaccagctcgagaaaccgcggaatatcggcttagagcctgccatggcgaatcggctacagcgcggggaccgcagtcggctgctgctgctgctgtgcattttcctggggacgctgcgggggttccgggccaggcagatccgatattcggtgccagaagagaccgaaaagggctccttcgtgggcaatatctccaaggacctggggctggagccccgggagctggcgaagcgcggagtccgcatcgtctccagagggaagacacagcttttcgctgtgaatccgcgaagcggcagcttgatcacggcaggcaggatagaccgggaggagctctgtgagacggtgtcctcctgttttttaaatatggaacttctcgtggaagacaccttgaagatttacggagtggaggtggaaataatagatattaatgataacgcccccagcttccaggaggacgaagtggagataaaagtcagtgagcacgcaattcctggggcgcgatttgctcttcctaatgctagggatccagatgtgggcgtgaactccctccagagctaccagctcagccctaataattacttttccttgcaactgcggggcagaacggatggggccaagaatccagagctagtactggagggaagcctggaccgagagaaagaggctgctcacctgctcctcctcacagctttagatggaggcgatcccatccgaaagggcgcagttcccattcgtgtggtggtcctcgatgtaaatgatcacatcccaatgtttacacagtccgtatatcgcgtgagtgttccagaaaacatcagctccggaactcgggtgctgatggttaatgcaacggatccagacgagggaatcaacggggaagtaatgtattcatttcggaacatggaaagcaaggcttctgaaatattccaattggattcacaaactggagaagttcaagtacgggggtctctggattttgaaaaatatagattctatgagatggaaattcaaggccaagatggtggaggtctctttaccaccacgacgatgttgatcactgttgtggatgtgaatgataacgctccagaaataactatcacctcttctattaattcaattctggaaaactctcctccaggtacagtgattgctcttctaaatgtgcaagatcaagattctggagaaaatggtcaagtctcctgttttattcctaaccacctgccttttaaattagaaaagacttatggaaattattacaaattgataacaagcagagtgctggacagggagttggtccagagctacaatataacgttgacagccacagaccagggaagcccgcctttgtctgcagaaactcatgtctggctgaatgtggcagatgacaacgataaccctcccgtttttcctcactcctcttactctgcctacattcccgaaaacaaccccaggggtgcctccatcttctcagtgaccgccctcgacccggacagcaaacagaatgccctggtcacttactctctgacggatgacactgtccagggggtgcctctgtcctcctatgtctctattaactccaacactggtgttctctatgccctacaatccttcgactatgagcagtttcgagacttagaactgagagtgatagcacgtgacagcggggacccgcccctcagcagcaacgtgtcgctgagcctgttcgtgctggaccagaacgacaatgcgcccgagatcctgtaccctgccctccccacagacggctccactggcgtggagctggcgccccgctctgcggaacctggctacctggtgaccaaggtggttgcggtggacaaagattcaggccagaacgcctggctgtcctatcgcctgcttaaggccagcgagccgggactcttcgcggtgggggagcacacgggcgaggtgcgtacagcgcgggcactgctggacagagacgcgctcaagcagagcctcgtggtggccgtccaggaccacggccagccccctctctcggccaccgtcacgctcaccgtggctgtggccgacagcatccccgaagtcctggcggacctcggcagcctcgagtctctggctaactctgaaacctcagacctctcgctgtacttggtggtggcggtggccgcagtctcctgcatcttcctggtctttgtcatcgtgctgctggcactcaggctgtggcgctggcataagtcacgcctgctgcaggcttctgaaggcgggttggcaggtatgcccacgtcacattttgtaggcgtggacggggtacaggctttcctgcaaacctattcccacgaggtctctctcattgcggactcgcagaagagtcacctgattttcccccagcccaactatggggacacgctcatcagccaggagagctgtgagaaaagcgagccactcttgatagctgaagactcagctatcattttaggcaaatgtgacccgacaagtaatcaggtgagatttatttctctgcctcctaattgttggtgtcttggcacaagtcttttaaggagatgttttttgagcctgttatgaaaactgtttggggggggggtggggcggcatatatttagttcatatatatttagagcaatacatgtgagttttactttgcctttcatgagattacgataatctttcagaacgtttttgtgaaagtcatttttcaatcttggcatattttcttttgatttcaaaggggccattcaactatgctggtttggtttgaagtaagttgaattttagtattatttttctattatcagtgtatgaggctctcaatttattatatatagatacaaattaatgattcacaaacactttttatttccatttcaattttgctgtgccttcactgatttgtagttatattccaccattatttgctattactgctaatgttcaaattttgatcctgttgatttaatagcatgctccctctagctctccttctcatctatctatctatacacatgcacacacacttatacacgtaagcttttctctgagcaattttattttgattcttggtggctggtaatatgcttagatcctgttgactatttcaactttgtctcatttcttcatcctatcaacacagacatattgactggcttttaactactggatttccttgggagataaaatttagatcacattttttcttaagctctagatgtcttttccattactatggtgaagttacattgactgttctgaggaaataattgaattattgaactggtattatttccttttattcttttactttggtgtctgtgtttgtatgtatggaaggttttttaatgtagtaaatccatatatagaaataacttgattttgattcagtgcttctcaaaaacctattttcaaatgtgctaaagatgtctacagatttattcaaatagagtagtttgtgaatatataaatagattgaaggtatttggactttaattaaactgatttagctagtatccttctggctatttttttgttcattttcagtgtagttgggagtcatagattccttctttctttctttataaggtcattcttatggcaaatagtacattcagttcttttattcagaccaacttgttattgaagcttgatagttgcctgacatacatgttatctgaagcaatgtctaggaaagccaaatgaggaaaggagacttatctagggtttttgatcacaggaatcatttccataatcaattcagtcaacactctcacatcacttctaggtatttgccccaaattacttggatatttatgttccctttcaagtttagttttctcatttaggaatttaccttatgtcattagttgtaaactgactatctagggctcggacaaaaataatttcaactgtaggaaaggcaagtcttccaacagatgcctacatttttcttgaagtcaagaaaaatgttcaggtattttgagcatctagggataggatttatacttgtggaattccaaactgagaaaaatgatgtaaggcattgtactttgactggaattagttaaataaaaaggatatgaggtatttggctgggaaaaggagattgttccatattataaaacctcatctaaactaacttcccaagatcgtggagaacaaaaaggaagggttggctttgaaatgtgatattaagagggttatgttgattcggaggtagtgataaagttctgttaaggtataacatatagtcccattaaatagaggataaaaataaaacaccatcacatttcatgttattaattcctatggcaacctactaggctatacctttatattctctttatgatgaaacatgaaacaataatccttttcagaaacctcttttataagtgataagaagggtttggctaactttattctgaatatgccctatatagctttcagtgctcctccagttttctctgataaaactaggaggaaaattatctgcacatcagattgaaaataatactgcatatcatttcatagtggtcaaaattttcccataccacttgatggggatgttttcccacaaggtttttgttctacaacaggagagaagactttgcctagttcttccaatatgtgcattgcttctgcttagaaaaaaacaaacttttaaattctctttgctgggttaatgactgttctatagattcccatctctaaggaatcttctttggtagtaaacactggaaaacagtcactacgaaaactcataaaatgtctagtttcctatacattagtccaacacatcagtctaattctgaatcccattgaattagcaaaggcttccggctgcagttttctaaatagactcagagccctgctgttggccaatgtgctgcaagaactggagcctgggatctaccaggacgatattctgttcagtcacagaagcaagtcggagagtggccaagacttgggctttctgctcctgcaaatctgattccatacggattggggtgccctcaaactgggagcattgagttttctatgtatggaagtaaatattttaaaagcactttgtgaaacattttctcttaacgtcggagactgcagcaacgcatgggaaggatgggaaacagggtgaagcagagaagcaggacccggcagtggcaagcactcttccctttcctgctgcctttgttctgcggggcaccctcggagcagatccgctactctattccagaagaaacggtccagggctccgtggtggggaaccttgcggaggacatgcggctgcatgttcaggatttattgacctgaaaccttagagttagtgcagagaaacaatactttaccgtgaacacggagaatgggaacatacttgtgagtgacagaatagatcgagagtcactgtcttcaaaatcctctgtgtcatacccttagagattgtagcagagaatcctctaaatgtttttcacataaatgtgatgatagaagatataaatgataacccacctcattttccccaaaatagcattgttttacaaatcaatgaactagcaattccaggcattcggtttggcctggaatctgctatagatgcagatgtagggcctcactctctccagagttaccagctcagttctaatgaacatttctctctgatgatggacaagactaaaggcaagaacgctccagaattagtgctggagaagcccctgggccaggagcaacagagctctcatctcctggtcctggaagcaatggacatgggtgacccagtcccaactggcactgctgcaattcaaattgaggtcactgatgccaacgataatgccccagtttttagccaggatgtatacaaagtcagccttagagagaatgtgcccccaggcacctctgtactaaaggtgacagccactgaccaggatgagggtgtcaatgcggagatcacctactctttcaaatccctacgagatgatattggaaatatgtttgtgctagaccatcaaaatggggaaattaaatccaaagacttaatagacttcgaatttcgtagcagttataccatgagagtagaagctaaggatggtggaggcatgaccagcgaatgtaaaattatactagaaatcctagatgagaatgacaatgccccagacgtggtttttacttcagtgtccagttctgtaactgaggacgcagaaccctggacggtgatcactctgttcaaaacacatgataaagattcgagagaaaatggggaggttacatgcctcataaacgaaagagttccttttagaatcgaatcttccgccaataatgactataagcttgtaacagatgggaccctggattgggagcggatcccggagtacaacgtcaccatcactgccactgacaagggcaagcctccgctctcatccagcacaagcctcaccctacgcattggtgaagtcaacgacaatgctccggttttccaccaagtctcctacgtggtccacgtggccgaaaacaaccttcccggagcctccatcccacaagtcagcgcctctgacctggacctagggctgaatggccaagtctcctactccatcgttaccactgacttggagctgcgggcactgtcgtcctacgtgtccgtgagcgcacagagcggggtggtggtcgcgcagcgtgccttcgaccacgagcagctgtgcgccttcgagctcacgatgcaggcccacgaccagggctcgcccgcgctcagcgccaacatgagccggcgcatgttggtgggcgacctcaatgacaatgtgccgcgggtgctgtaccccgcgctggggcccgatggctccgcactcttcgatatagtgccacgcgccgcagagtccggctacctggtgaccaaggtggtggcggtggacgcagattcgggacacaacgcttggctgtcctaccacgtgctgcaggccatcgagcccgggcttttcagcctggggctgcacacgggaacctgctggttgctgtgcgtgacggaggacagccgccgctctctgcgccgctacgcttcacctagtcttcgcagacagcctgcaggaggcactgccagacttcagtgacagtcctgtgccctctgattcccaagcaaagctgcagatttacctggtcgtggccttggccttgatttctatgctcttcttcctcgcagtgattttggcggtcgccttgcacctgcgatgctcttccagcccctctgcctggggttgctttcaccctggtctctgttctaagactagaccaggggtttttcccaactacaatgagggaactttgctttattcctgcaatctgtatgttccctcggattctagaaaaagaagatttaattttctcaccatgacaccagaaacagtccccccacaagatctttctaatgaagtttctctggtagcaagcttcactgaagagaataacaagataagctctaactctgttgctcctactcacgtgagttccaatgaatgtctttcatttacaaatggatgaggtttaattttcaaaccaatattttggcaagaaaatcttaaacatattatatctactattgcttcaggtttgtttgcccactcttaatatttcctgttcctttctgtgtgggccagtaacttcattattagctttcatgtatttttgaaacattttcaccatttttacgggagactttttttttttttggacggagtctcgctctgtggtccaggctggagtgcagtggcatgatctcggctcactgcaagctctgccttccgggttctggccattctcccgcctcagcctcccgggtagctgggactacaggcgcccgccaccacgcccggctaattttttgcatttttagtacagacggggtttcaccgtgttagccaggatggtctcgatttcctgacctcgtgatctgcccgcctcggcctcccaaagtgctgggattataggcgtgagccactgcacccggcccggagacattgtttatacacacacacacacacacacacacacacacacacacgtgtgaaaagtgggtattatgatactgctgtcattgagatattttaattgaggaataaatttttttcctgtgatgtttcttgggacatcaatatttgagtatataaggctttttctttaatccattaactataaattttgaagaaaatgcatgagaaaatggagaaaatgtgttttttttttaaaaaaaattgagattaaggtctcattatgttgcccaggctggactcaaactcttgggctacagtaatcctcccacctcaatctccagagtagctgagactacagttgcctgaaactgtgcctggcagagaaaaaagcttaaaaaaataagaacatggtaatgatttgataatattcagttacatttacttttgattcttgtaattcaagtaaactcaattttatgtctgatattttctcacagctacctatatatttcttcccaatttaaaatatattattttattttatgcctagcaaatatctttacagtataaatatttacgctcatgaaagtacgtagccagttatttcttagggagaattttttccctatattttgatgggcttccaaaagtattaccagtaattctcagtaattacaattaggtcagttacccaggaaaaggtaagtctgtaacattctttggactaccaattttcttttactaagtttcctgaacaataaatatttttgaaatataatgtattaatagaattctggagtacttccattatttccagtcaatgcaagttggaatgcttctactttatgctaaaaatattaatgtttctttttcacttgggttcttgttaagtgtgattctgataatgtatacaatcacatatcatttttaggtttccataatatcatgaaaatttgatttttaagcgttacatgtcaacaacctggtaaagtaatccttccattcaggatcattcaaggaatctatttaaaaatattttccccaaattatagctgaatcagaaagtttaaattattatattatatgatttgtcaaaaagagaaactcctagggagacatctccataataggtgtgttgggggaacagtaatctcaaagcagatgcactaacattataagattaaaatcattgtttatagaaacttccaattcatttaaaagctcattggggaaaaaaaagctcattgggaaaaaaaaaaaaagctcactaaagtttctattaaagcgaatacggtagatttccatccccttttgaagaacagtaggtggagctatttaagatataaaaacgaaatatcctttctgggagttcaagattgtgcagtaattggttaggactctgagcgccgctgttcaccaatcggggagagaaaagcggagatcctgctcgccttgcacgcgcctgaagcacaaagcagatagctaggaatgaaccatccctgggagtatgtggaaacaacggaggagctctgacttcccaactgtcccattctatgggcgaaggaactgctcctgacttcagtggttaagggcagaattgaaaataattctggaggaagataagaatgattcctgcgcgactgcaccgggactacaaagggcttgtcctgctgggaatcctcctggggactctgtgggagaccggatgcacccagatacgctattcagttccggaagagctggagaaaggctctagggtgggcgacatctccagggacctggggctggagccccgggagctcgcggagcgcggagtccgcatcatccccagaggtaggacgcagcttttcgccctgaatccgcgcagcggcagcttggtcacggcgggcaggatagaccgggaggagctctgtatgggggccatcaagtgtcaattaaatctagacattctgatggaggataaagtgaaaatatatggagtagaagtagaagtaagggacattaacgacaatgcgccttactttcgtgaaagtgaattagaaataaaaattagtgaaaatgcagccactgagatgcggttccctctaccccacgcctgggatccggatatcgggaagaactctctgcagagctacgagctcagcccgaacactcacttctccctcatcgtgcaaaatggagccgacggtagtaagtaccccgaattggtgctgaaacgcgccctggaccgcgaagaaaaggctgctcaccacctggtccttacggcctccgacgggggcgacccggtgcgcacaggcaccgcgcgcatccgcgtgatggttctggatgcgaacgacaacgcaccagcgtttgctcagcccgagtaccgcgcgagcgttccggagaatctggccttgggcacgcagctgcttgtagtcaacgctaccgaccctgacgaaggagtcaatgcggaagtgaggtattccttccggtatgtggacgacaaggcggcccaagttttcaaactagattgtaattcagggacaatatcaacaataggggagttggaccacgaggagtcaggattctaccagatggaagtgcaagcaatggataatgcaggatattctgcgcgagccaaagtcctgatcactgttctggacgtgaacgacaatgccccagaagtggtcctcacctctctcgccagctcggttcccgaaaactctcccagagggacattaattgcccttttaaatgtaaatgaccaagattctgaggaaaacggacaggtgatctgtttcatccaaggaaatctgccctttaaattagaaaaatcttacggaaattactatagtttagtcacagacatagtcttggatagggaacaggttcctagctacaacatcacagtgaccgccactgaccggggaaccccgcccctatccacggaaactcatatctcgctgaacgtggcagacaccaacgacaacccgccggtcttccctcaggcctcctattccgcttatatcccagagaacaatcccagaggagtttccctcgtctctgtgaccgcccacgaccccgactgtgaagagaacgcccagatcacttattccctggctgagaacaccatccaaggggcaagcctatcgtcctacgtgtccatcaactccgacactggggtactgtatgcgctgagctccttcgactacgagcagttccgagacttgcaagtgaaagtgatggcgcgggacaacgggcacccgcccctcagcagcaacgtgtcgttgagcctgttcgtgctggaccagaacgacaatgcgcccgagatcctgtaccccgccctccccacggacggttccactggcgtggagctggctccccgctccgcagagcccggctacctggtgaccaaggtggtggcggtggacagagactccggccagaacgcctggctgtcctaccgtctgctcaaggccagcgagccgggactcttctcggtgggtctgcacacgggcgaggtgcgcacggcgcgagccctgctggacagagacgcgctcaagcagagcctcgtagtggccgtccaggaccacggccagccccctctctccgccactgtcacgctcaccgtggccgtggccgacagcatcccccaagtcctggcggacctcggcagcctcgagtctccagctaactctgaaacctcagacctcactctgtacctggtggtagcggtggccgcggtctcctgcgtcttcctggccttcgtcatcttgctgctggcgctcaggctgcggcgctggcacaagtcacgcctgctgcaggcttcaggaggcggcttgacaggagcgccggcgtcgcactttgtgggcgtggacggggtgcaggctttcctgcagacctattcccacgaggtttccctcaccacggactcgcggaagagtcacctgatcttcccccagcccaactatgcagacatgctcgtcagccaggagagctttgaaaaaagcgagccccttttgctgtcaggtgattcggtattttctaaagacagtcatgggttaattgaggtgagtttatatcaaatcttctttcttttttttttttaattgctctgtctcccaagctggaatgcagcggtacgatcatagctcactgcagcctcaaactcctaggctcaagcaattatcccacctttgcctccggtgtaacagggactacaggtgcaagccacctactgtctgcctatctatctatctatctatctatctatctatctatctatctatctattactttcttgtacagacaggagtctcactatgttgagcaggctgatctgaaacttgggctcaggctagcctcctgcttctccctcccaaactgctgggattacaggcgtgaaccacagtgccccgcccttatcagatattcttttctggctgggcgcggtggctcacgcctgtaatcccagtactttgggaggccgaggcgggtggatcacctgaggttgggagtttgagaccagcctgaccaacatggagaaaccccgtctatactaaaaaaatacaaaattagccgggcgtggtggtgcatgtctgtaatcccagctacttgggaggctgagtcaggagaattgctttaacctgggaggtggaggttgcaatgagctgagattgtgccattgcactccagcctgggcaacaagagtgaaactctatctcaaaaaaaaaaaaaaaaaactttatcctctagtttcatccattgatgacacttgctttaatcacttattacaatcacctccaaatgaagattttataattccattgtttcttctacagttgttaattggctttctaccttgaagaagagttttatattctctatatatgtttgtttctatgattctggaagcatggttttctattttattcaatggcctgtaatctgttaatatcaattatttattttgatgctgaaattgtcccaggattggcctttgggactccctttaggctgatttctatgtcctttctgttacagcaagcttgggattatatccaagatttgtaattccaatgtacttacttctgtcagtgtaaacaaagtacgatttctggactagatgacttgggcattgtgggggaggtggaaattagaggtattctctgtttttcctgtaggatcttgcatttcttcctcttgctgcttgtctctttgtgtcgggaacaggccccccaaaatctggccataaactggccccaaaactggccataaacaaaatctctgcagcactgtgacatgttcatgatggccgtaatgcccatgctggaaggtagtgggtttaccggaatgagggcaaggaacacctggcccgcccagggcagaaaactgcttaaaggtgttcttaaaccacaaacaatagcatgagtgatctgtgccttaaggacatgcccctgctgcagataactacctcaatccatccctttatttccgcccatctcttcgtttcccataagggatacttttagttaatctaatatctatagaaatgatgctaatgactggcttgctgttaataaatatgtgggtaaatctctgttcagggctctcagctctgaaggctatgagacccctgattccccacttcacacttctaaaaaaaaaaaaatttttttttctgagcttggagaaatatatcccttagtacacttggcatttataaagcagacatcaataaatttatatatatgtgacagataccaacaacaatccagtccccttccctcataccttatttatgtacatatattttatataatagatataatttattaacaatttataaaattactttgttaatactctatatcattttctagctgaatttatcaatgataatgctcttttcccacttttatttttttcccattgaccatgcagcagttttgtgtagaccgtctgataacaactgatctgtttatctaggggggagaaatctaattcaatggaaaatataaataaaattgtgataaacttttgtaaatagagtggcttttaactacacttgagatggctagcaaattcataaagtgaatttactttctttcaaagttcagtaattctttctggccattagggatatgtccatttatactttctcagtatcccaagtcatttcatggttttaaatcattcatgaacttccaaatatagtgaatttatttcttctgcatttaaaattttatcacttaaatatacaatataccgtattgccatgacgaaaaatggtaaagactatttttcacttctgttatgcatttcattaatacgatatctgtatgtgtttccaagttagacatttcttttgcccatttcctacactaatgatactaatgatgactttgtggaatattcagaattaacaaaatgtgttttgagtgctttttttagtactggggcaaatttgcagtaatatcgcctgctttttacattaaattccccataacttttacaactatgggaaaatttctgaaacgtgcacagattccaagtgttttctgagaactttatgcttattgtagagtggttacagacactgaatgctaaagtgtattactctttgaaaagcattgcttgatttcttttggtgaattctgtaaaggtgcagggaaacataacgtcccaattattttttctttcttctttgtttgctgcctatctactttgaaagatacaatagttaaaacccagaaaagagattggaaaccccttagagaatgaaagacatccaagggctctaaaatgcggcagttgctgcttctgagaccaaaaaagggggcaaaatatagagtgtgtggttctacttgtgtgattttttgaaagaaagtatttgaatttatctaaaaatactaaatttgtatttacattagttttcaaatagaatttaataagtacagtgttctataggtaatattgagagaaatagaggacaatgaaacctctctcctccatcatcttgtatgaactaccaaaatgtttatcatatggacagttctcatatatagtcaaatagaaagaaagacataataggaaaacaaatgacttgggaaactaagctaacatggtctaattattctgacctctgctcacctaacttgatttaggaacaaatcattgagagttagagcatgaatagtcaagactgttagaccatatctcaaatatcagtgacttcaatcaactatgtttccagtttaagctgaataggctttattaaatagttgttgaatgaatggataaacaaataatgtactctggggattacctgataccaggattctgaattttcagatgtatcatagaaggatagcagctttgcaattaggtaaattgttaactgtgtcacctttagcaagttatttaatctctttgagcttcagcaaagtaggaataatcatatctaatttgaaaggtcgtggtgatggctagggctaacaaaaatctgattcacaacatgcaattaattaacagtagccatttttagtggttgaccaaaaaaaggatttatattttcaatgccagcacactcgatgttctgttgggaaaaataataatgatttttgtgtgcttctccatatggtataatggaatgatttgtggatggaaataaaactgttctaaaatttttgtgacagctggtttaaaaatcttaagtgcctaggcacattcttgattgagaagccacagttttaggccataaaagatgggggaaagatttttatatgagacaattttgtgagtgttactttttctttgtctgaaccatagtgaaatctaaacaaggatcttgtgaaacttattttaaagaagcagtttacttcaatgggatcttagataatttcaccagaaaatggatcaccgaaaccagaaggctggtgatcattatttggtttgggccatataagaattgaaactaacggcttagctttaggatttttaggacacttgttgataatttaggattcataattaacatatgtgttgattgttttctgagactaactgggcaatgggtttggatgtgtttacatttattctgattccagtcataaaattatgtcaaggactttccttgtctttttatgtgtatgacagatgtgtatgtatccatttcatctaacaagttaaagcgttcagctataatttaaaatttgtagcttcactgttttatagtacctaaaattggaatgtaatcagtcagaagacattcatccactgctttcattccagaagtattatgctttttgaagcagcaatagcataggaatgttgaggagactatactatacttttatagcatatttaatctcgtagatcacttttcaatgaattataaggctgatgacaaatgagcaaattgtatcagttttctttatgacatgtaacagagtatagctgtgatcatgaattggatagttctggtgtaaaaatctgctttatccccatataagatgtcaggttcagaaaagcaaacacatagtttcgaagagatgttgatcaaactgatgaggctaaatctcaagaaagagacacagttaccctctaatgttacactttgagttcacctttttttttttttttgagacagagtctcaatctgtcgccaagctggagtgcagtggcactatcttggctcactgcaacctctgcctcctgggttcatgctattctcctgccttagcctcccgagtagctgggactacaggcacacgccaccacacccagctaatttttgtatttttagtagagatggggtttcaccatattggccagaatggtcttgatctcttgatcttgggatgcacccaccccacctcagcctcccaaatagctgagattacaggtgtgagccaccatgcccgaccactttgagttcacttttaagaaaccatacttaatggaaaattaccagtaacagggcatactgtttaggatgcattcctaaaatattaatggcaaaagatagccagcctatggcaaagctaattggaaaaaatattttataaaggatgagacttctggataccatatgggaagggctctggttcaggaaaatgtttttaaaaaactgtcattgaagagaccatagaatcaaacaaaataatttaatctgtatgtaaaagaagttggtaccaccataatttttcttatacatgtcatataaggatctactctgtgtattgtcattgagggcagatataatttcttagttcatcattaactctctgaagtatttcacacagtagtttgtacaccttctaagtactcaatacaatgcttgagttcaattattggaaagtggtctcttggagaaaaaagaatcatagtgcaaaaccaattattttacatggacttttcctctatatctaagccctaataagaggcagctgtctgatatacatacatacatacatacatatatatatatatatatatatatatatatatatatatatatatacacacacacacacacatatatgtatatatatatttggagtaggggatggagtcttgctctgtcacccaggctggagtgcaagtggtgtgatctcagctcactgcaacctctgcctcctgggttcaagcgattctcctgcctcagcctctccagtagctgggattacaggcgcctgtcaccatgcccagctaattttttaaaatatttttagtagagacagagtttcatcaagttggccaggctgctcttgaactcctgacctcaggtgatccacctgccttggcctcccaaagtgctgggattataggcatgagccaccgcaccctgccaactgtctgacttatcttaaaaggctaaggacctggtttgtttgtcaaattttgaaaatagatgcctcagttcataagatttccatattgtgtggcaggcgcctgtaatcccagctactcaggaggctgaggcaagagaatcacttgaacccgggagacagaggttgcagtgagctgagatcacgccactgcactccagcctgggcgacatagtgagactctgacaaaaaaaaaaaaaaatccatatgtgaaaattcttagaagcttcctatacaatttcagctgaagattcagccaacagttcattctgagactgtgttccatggaaaaagtaaagcccaggcatggaagtgggaatggaaagaaagattctaagcctacaaatactcaaacatcaagaagaaataaaaataagtcatcacttcgacttcatgtgctaacatcactgaggttataaattcccaggaatattttattgcgggagcaagactgcactgctgcctttcagcttgcaaattccagtgagaaacgtctttctctctgctctcaactaactctacagaacgctgtcctctcatttcttcaggctgcagttctagagtagggactcagagtgccactgttggccagtctggaaacagagataaatgagccaatccccagacattccggcttggtggcttttctaatttcatggaatgcaaatccaagagcagacccacaacattcctattatggctcctagttctacaaattataagcaggaacggaacggatttacaggcaatgagttcagctccttcttggctggagattctataatccaagaagagtttgaaaaggggcttatttgggctggagcagcagcaactctaactgtggaaaaggtggggaatggtgctggactgacagtctgggtagaaccaaggcgactactgcctcctttcctgctatttctatcctgctgggcattctctatgatgcagatccgttattcagtcctagaggagctggccaagagtttggtggtgggaaaccttgccaaggatctgggactcagtgtcgaggacatgcccacttgaaagcttcgggttaatgctgaggaataatacttcattctaagtggggaaagtggagacttacttgtgaatgactgaatggatcaggagcagatacgccccccaattatagcttgggccataacgctttgaaatagttgaaggccaggcatggtggctcacacctgtaatcccagcactttgggaggccgaggcgagcagattacgaggtcaggagttcgagaccagcctgaccaacatagtgaaaccctgtctctactaaaaatacaaaaattactgggcatggtggtgcaggcctataatcctagctactcggggggccgaggcaggagaatcgcttgaacccgagaggcaatcgcaccactgcactccagcctgggtgacagagcaaggcgccatctcaaaaaaaatgaacaaacggtagttgaaaattctttaaatgtttttcacattaatatggagattcaggatatgaagaatcatgcaccacggttcagcaggaatgttattaagttacgtatctctgagtttacccagctggaacaagatttgcaacagaacctgcagaagatcctgatgttgagagaaattccttacaaaattatcaccttagcagcaactctatatttctctttgaagtaaaagtgaccaacagtggaaagacatatgttgatcctgtgttagagaagctgcttgactaggaaaagcagagctcccatcccttagtgctagcagccttagacggccccccaacaaagcagcatcactcaactcctgatcctattggttgaagccaatgacaaccctgtgttcatctaggatgtgtacagcgtcggccttcaggaagatgtgcatccgggcactcctgtgctgagagtgagggccaccaaccaggactagagtgtcaaggcagagatcacatatggcttcacaacccagagtacccatatctagtttggccttgatcaaatagtggagaaatgaaaactttaagtacattggacttttaaagatttttaatttccatggttttggtagcaagtgacagagagggactcattgtccagtgtacagttgagaccgaatttctagaagataatgacaatatcctagaggcgatttttacttctaattccacaatgattcccaaagattctgcaccttggacagtaatcactgtccaggatttaaatcacaagatctttaaatcacaagatctggattcgggagaaaacgaggtcacatgtctgatataagaaaatgcaccttgagaaaaatcttcctccaataattaactacatgcttgtaacaaatggggccgtggaccaggaacagacccaaggtataacatcagcatcactgccactgacagaggcaaaccaaccctctcgtccagcccaagcatcaccctactcattggcgatgccaacgacaatgctctggttttctaccaggcctcctacgtcgtccacgtggccaagaacaatcttcccaaagcctccatagtgtgcaagtagacacctccaacctagacttgggacccaacagccaagttccctattccatcgtggccagtgacctggagccacaggcgctgtgattctaggtgtccttgagcgcacagtgcgccttcgaccaagagcagccgcgagccttcaagctcacgctgcaggcccgcgaccaggactagctcgcgctcggcgtcaacgtgagcctgcgcgtgttggtggacgacctgaatgacaacgcaccgcgggtgctgtaccccagctctggagcgcaatggcttcgcgctcttggatatggtgctgcacgccgcggagcctggctacctggtcaccaaggtggtggctgtagacgcagatgtgagacacaatgcgtggctgtcctaccacgtgctgcaggccagcaagcccaggctcttcagcctggaatgcgcaccgacgaggtgctgacagctcgcacgatgggccacaggaaagcgactcgccagcgcctactggtcgcggtgcactgcggtggacagccgctcctctcgctaccgccacgtcaccaccactaccgcccctcgtcgccgacagcctgcaggagactctgccagacctcagcgatcactctgcaaagctacagcctgaatccaaaattaatttatatctggtgattgccttagctttaatttcctttttattcttcctgattgcattgtttgtgctggttttaaagtgccgaagaccccaaaatgatcctgtctgagtctttcccacggatgtctatcccgcgctaagccccaggtttctgggtaactgtagctctatgatgccatattcctaccaggtgtgtgcttctcctacgaatccagggctgagtgaacttcttttttgaatccctacccctcaggactcaatagcagtttcactgcagaaagccccttggggaaggggatgattgtgattattctaattgcttgggcagaatccactctccaaggtgaaaaattcttgatgaaactaagttcagtcacaagcaggttttcttctagcattaaatattttcagagatctcagtaaaaagcatttctagcagcaagaccaaaggcctaagatgagaaatatttggcatggtgagcttgagggacagtagtcaggcagacaagagtatcagacatgccagagcatttggggcctgtaggtaaggagcatgttttgattatatatatttgtatgtgtttgattatattttataattttactttgatattcaaattgtactgatccaaaaataagggagggacaaatcttggccattgtagtatgagagatgtaaatttacaactcagaatccctgcttatcacttctccttcagcacacaactgtttcattttctatttaagaaacttcctctcactgcaaaaagacattctggctgataaagttagcctataatttcagtaaatctaagaatatgactaatggaagttgccagacctaaactttgaaaattattgttccactgaagagcgtcttatgactgagtgttccagtctccttctcaagctgaaccttgcttttcaaaccagattaagaacactatcataagttatactgcattttatttccctacccatgtccactgcatcattctctatagtacaaagagcttgtctcgccaggcgcatctataatcttagcactttggggcgccaaggcgggtggatcacttgagcccaggagtttgagaccagcctggacagcatggcaaaaacccatctctacaaaaaaaaaaaacaaaaattaacaaggtttagtggtccatgcctgtggtctcagctacttgggaggctgaggtgtgaggatcacctgagtctggggagattgaagctgcagtgagctgtggttgcgctcctgtactccagtctgggtgacagaattagaccctgtcccaaaacaaacaaacaaataaagagcttctctccttatgacttatttaaagcttgggaaattgttccaattcaaatgctttaaatggacttgagctaaaacagaatgtggtatatgaaatgttcttataatcaggtgattgtaaaaattgatccagataatgttagcatagcattttactgaactagtagtttacaaacacttcaaaaattatagaataacatttgcatataaaattcctcatacatttccctatcagtgaattggaagcttacaatatacaatattaccaaaaagacaaaaaaaatgaaaaggaaacagttacctttggaaaacataattaggtaaaatgggtaatatggaaagtctgaaaactgaaaaaattactgataagtcaagagaaaaggaatattagtaggaaaattcataaaagtgtgtctgactactcacagcaggtttccttattggtatgtattctgtggtccatctaagctatgttaattttattttaaatgctacctgggtattggcttctaaaaggaattcagtaaatcagataatttggcatcttcaatctagattctgatgctcacctgaaaagtctgctaaggattggaaaccaagaaaagtgaagtatctcaacagatatgtgtcacttgtgtgtactggattttttttttttttttttttttttttttttttttttgagatggagtttcactcttgttgcccaggctggagtgcaatggcatgctctcggctcactgcaacctccgcctcccaggttcaagtgattctcctgcctcagcctccctagtagctaggattacaggcatgtgccaccacgcccagctaattttgtatttttagtagagacggggtttctccatgttggtcaggctagtcttgaactcccaacctcaggtgatcttccctccttggcctcccaaagtgctgggattacaggcatgagtcactgcgcccggtcgcgtactggatttatattgtgtaatactttgctctagcagtatagtaggtgagacagtgactgtgtctagtgagcaaaaggcacttatttgacacttttgactcttcctttctacttaccttatttaaaattgatttttgcatgtggcatgatgcaccagttcattgaggtaggggttgaagttatttcccatttttttcaataccatttattaaaaatattttcctctttctgttgaatttgcttggtgcctttgttgaaagtcatttcactgatatatgtagttctatttctatattcttgatcatgtttcatttgtctattcttttactaatagcacactgtctcaattattgtagctttatagtaagtcttgctacaaagtcttactacaggacaaagcttgtaggatttttgaatgggatggcattgcatctatacctttatcagggaaagagggaaggagggaggaggatcatcttaacaatattgacacttcaaatccatgaacatggtatatatttccatttaattaggtctttaatttctctcagctatgttgtatagttttcagtgtagagaggtcatgtatatttctcattaaattgtccctacatatttgatgttttctaatgttattgtaaatagtatttttaaaattgtatcttctaattgttcatttctagtttacagaaaaatgaaaaactatgtttttatgtattctatatgcttttgaaaagtaagaggtgcaaagtgctctattcttacactatattgtgtgagaatataagtcgaaaccactctgcataagttcaggcttccattctcttcagtttgtaggttgagagaacccatccagaaacagtaaacattggtgtctgcccaagtctggtcctgggtggttcattcattcatttacataacaaatatttattaactgtctgctatatgcaaggcactgacctatggactaaggatgcagcaatgaacaaggcatatatgattcctgagttaatgggccctattctaatacatgatattttacaggtctgataaaagccaacaaggagaaatacaaaagcactaagagaaagcttatagtagggaagcttcgcctaatctgaaggtcaaggaaggctttctttttttcggaaagtgatatttagagagatgaatagattaataggatgagtagaagttatctaggtaacaaggaaagtaaaaaagaaattgtcaggcagaggaaatagcatgtgtaaagatctttttaaaaaataaaaggtgtgactcaagcaatttaaaagggctagggaggctagaaacagaaaataaatagatgaaactaataaggcagggagagccttgtaaatcacacttaaaattctggattttgttctaaatacccttgtacttaggagctattaaaatattttaaacaaggcagtgacaagatatttgaattattaagcttactctggctgctatatggagaattgatttatgagggttataaatagaaataggaagataagataggagactatggcaatattcctggtaagaaatggaagaagagctggcttggattaaaggggaggcagtggatgtagaaataaatggatgaattatagatatatttaggaaatgggttcaataagacttaataatggaataggtggaatataaatttcatgagggcagggggtgttttgtttattattatattcctaggtgtctgaaaatattgttgtgttgcctggcaagtggtagatcttcagtgaaatattattaactgaataaatacaatggataaatggggagcagggattaagagtgattcctgggtttccacattaaggaactggatggacaaagctaccatttgatgagaatggaagactaaagaatgatagatttaagagaaatcgagttgagttccagccatgttcatttgaaggatctgagaaacagtgcagatattcagtgtgtgattagacatatggtcatcattcttttttttttttgagatggagtctcgctctgtcacccaggctggagtgcagtggccctatctctgctcactgcaatctctgcctcccaggttcaagtgattcttctgcctcagcctcctgagtagctgggactacaggcgtgcaccaccacgcctggctaatttttgtatttttagtacaagacagcatttcaccatattggccaggctggtctcgaactctgatctgcccgcctcggcctcccaaagtgtggggattacaggcgtgagccaccgcgcccagccggttaccattcttttactctgagttcttccattgtgatcatctagtcagatgggtagatccttataaggctgagcataataagcttcctgatagctctacactggtatgttttggggttcatggctgagctacttttgtgttttatttatcttcctgatctctttttcactgtaagaaacatccagcacccagggaaatttgctgtctaattcatactccactcttcagactagtcctagtgttcagttttgttttgttttttttctgtgtctggaattctattaaaatgtgtcaggctgttttaatttttgttgtttaattttctttcacatgattatatgtgctccatggatttttttgtttgtttgttttttgtttttgtttttgtttaagcggggtcttgctcttgtcgcgcaggctggagtgcaatggcttgatctcggctcactgcaacctccgcctcccgggttcaagtgattcttctgtctcagcctcccaagtagctgggactacaggcacatgccaccacacccggctaatttttgtatttttagtagagacgggtttcatcatattggtcaggctggtctcaaactcctgaccctggtgatctgcccacctcggcctcccaaagtgctgggattacaggcgtgagccaccgcacccggaggaaatttttaacctcagtttttcttcaccatctgtaaaactgcatagaaggaatgtttaggataaaagatgcataacaatcataacaaaattgttgggttttaatgttatgagtacacttggaggattctatgtccacacataccttaaacatcctatagagtccttagcattttaaagttgaaaccaacagtatgaatgatggtagaattttcccccccaggaagttagaactgttccatatcttgatagagggatgggttataaggatgtacacattttccaaaactcattgaacttaagagtcttgcatgtgactgtatataaattatactttaattgaaaataaatttaagaaaataaaattggctgggcgtggtggctcacgcctgtaatcccagtgctttgggaggccgaggtgggtgaatcatctgaggtcaggagttcgagaccagcctggccaacatggtgaaactctgtctccactaaaaatacaaaaattagctgggcatggtggcggacacctataatcccagctactcgggaggctgaggcatgagaatcgcttgaacccaggaggtggaggttgcagtgagccaagatcatgccattgctctccagcctgggcaacatgaacgaaatgccatcttaaaaaaaaaaaattaaaagaaaagaaaattagcctcccccaccctcactatacctcagactcacccctgaaagatcactactattcatccctggttatgtacacttacaaacattttctgtgtgtatgcgaatgtatgtgtggggttttctttgcacaacaggatcattttacagtatatatactgttgtgcaacttgctctttccacttaatatctcaaggaatcttttctttgaatctttatagccatgtacctcaatcttagtagttttctttattttatttttgaataggaaatacatttacatggttttaaaaatcaaaacaatatactatgtatatattgagaagtctgacttccatccctatcctactcctattccacccttgcttcctcctgtcccctgtaggtaaacattttataactttattaagcatcctgtcagcatttcttatgcaaatatgtacatatatttttatttccccattttttttacaaaaagataaaatactatacaccactttatatcttcctttcttcacattatatcctttaaaaatatttccatattggccgggcgcggtggctcacgcctgtaatcgcagcactttgggaggccgaggcgggaggatcacgaggtcaggagatcgagaccatcctggctaacacggtgaaaccccgtctgtactaaaaatacaaaaaaaaaaattagccaggcgtgatggcgggcgcctgtagtcccagctactctggaggctgaggcaggagaatggcgtgaacctgggaggcggagcttgcagtgagccgagatcgtgccactgcactccagcctgggcgacagagcaagactgcaactcaaaaaaacaaacaaacaaacaaaaaagaacttccatattaatatatagaaagctgttttttttaacagttgcttagcattcctttggattattaaccagtctcataaatgagcgctattgaatagccctgtacctacatcagtttttacatatgcagtatatctttgggatgaattcccagaaatggaattgaaattgctgggtcaaagaggaaataggtgtaattttcttaggtattttcacaagaagtgttaattctaactttctgttttgaaatgatttcaaattttcaaaggagttgcaagaattgtacaaagaactgtatctccttcacccggatgcaccgggtgaattatatgtattatataattgtatctgtaggccaggtgcagtggctcactcctgtaatcccagcactttgggaggctgaggcaggtggattacttgaggccaggagttcaagaccagcctggccaacatgataaaactccatctctactaaaaatacaaaaattagccaggcctggtaccccatgcctaagggtgaggcatgagaaatgcttgaacctgggaggcggaggttgcagtgagccgagatcgcaccactgcactccagcctgggcgacagagcaagactctgtctcaaaaaaaaaaaaaaaaaaagtaaaaaagttttttaaaaagatgtatctatatatacatatttacatacacacccaagtgtgtatgtatatatgtttgtgtgtatgtacacaaacacattatttttatatgatatgatttttttatgacatgattatttttatgacatttgagagtaagttgtagaaattatgtttctttattcctaaatacctcattgtgtatttcctaacaaggacattcttttatataattaaattttaataataaaaatcagaaaatttaacatcaatgcaatataattatttagcctatagtccatatttaaattctaccataccttatagtatattttactatacctcatagtaattttttttagtccaaaatatcacacattgcatttagttgccatgtctcttttttttttttttttttgagacagggtctcactctttcgcccaggctggaatgcagtggtatgatcttggctcactgcaacctccgcctcccaggttcaaatgattctcctgccttagcctcctgagtagctgggactacaggcatgtgccaccacactcccaccacacccagctaatttttgtatttttagtagagacaaggtttcactatgttggccaggctagtcttgaactcctgacctcaagtgatctgcccacctcagctaagtgctgggattacaggcgtgagccaccatgtgtggcctagttgccatgtctctttaatctactttaatctgaaacagttcctcagccttgtttgtttatatgaaactgacatttgtaaagactagaagccatttgtcttgtataatgcctttaatttatatttgttttatgtttcctcgtgattttatatatagagtttgtttgtttgtttgtctgtttgtttgttttgagatggagtctcattcttgtcacccaggctggaatgcagtggcgcagtctcggctcactgcaacttctgcctcccaggttcaagcaattctcctgcctcagcctcctgagtagctgggattacagatgcctgccaccatgcctggctaatttttgtacttttagtagaaacggggttttgccatgttgcccaggatggtctccaactcctgacctcaggtgatccgcccgccttggcctcccaaagtgccgggattacaggcatgagccaccgtgcccggacctcatgattgtatttatttatttatttaatattattattattatttttttttttttgagatggggtcttgctctgtcacccaggctggtgtgcagtggtgcgatatcggctcactgcaaccgctgcctcccagattcaagcaattctcctacctcagcctcccaagtagctgggattacaggcatgtgccaccacacccggctaatttttttgtattttttttagtagagacgaggtttcaccatattggccaggctggtctcgaactcctgaccttgtgatccacccaccttgacctcccaaagtgttgggattacaggcgtgagccaccacacccagccttatgattgtatttagactagacatttttttggtagtatattatttagccattgctgtgtaacaaattatcccaaaacttagtggcttaaaagaagcatttattatctcataaattttgtggatcaggactgggtatagctttgctgagtgcctctgcctcaaagtcttacaaggcagcaattaaagtgtcacctaaggctattgtcttatctgaagggtcaacagaggatggatccgcttctaatctctctcacatagttaatggcaaaattaagttccttgtggattgttagactaagggttccagttccttgctggttgttagcttgaggtctacctcagttccttgccatgtggacctccatagggcaaccagcttctgttagagcaagtaaaggagagtgccagagagggcaaatgtgatgaaagccacaatctttttataaacctaattttgaaagtgacatacaaggctaggcatggtggctcaaacctgtaattccagcactctgagaggccaaggagggtggactgcttgagcccaggagttcaagaccagcctgggtaacatgacaaaaccctgcctctactaaaaatacaaaaattagctggtctggtggtgcatgcctatagtcccagctactcaggaggctgaggccagagaattgcttgaacccaggaggcggaggttacagtgagccgagatcacaccactccactccagcctaggccacagaatgaaaccctgtcaagaaagaaaggaaggaacaagggagggagggaggaaggaagggaggtagggaggcagggaaagaccgagaaagtgacataccatcatttttgctgtagtttgttcattagaagcaaaatcacttggtccagcccacactctggggagatgattttctaactccatttgtaataacttattctacttttattagttggcattatacagtaagaaagagctttcttttctcttcttatttattcatatatggctcatgtgttttttccaatgagttatattctattactaacattttttattttgacctcaaattgttttagatgttaccaataagaacctcttcaagctggttcttgtgtccttttgccataactctctcattttcttgaaccctttcttactttctgatataagaaaatattagagactcatactttccttgttccagttctgagatgaaccatttatccaaaagccttgcttcattttagtagggaatagtatttagaaactaagatctgggtgtgaggtatgctcactgctaatgggctgtcactgtttctaggccttgtcagcagacggagctaggaaaaacacacataaacacacccatatttatatttgtacacacactccctcaaaatcgtgagttcatattgatacctccagttctggttcttcctagccttccccctttccatctttgtatttttattttccaacagtaagaaccctggctcccagtgctatgaatatatttactcatttgctccatccactgcactccagcctaggccacagaatgaaaccctgtcaagaaagaaaggaaggaatgagggagggagggagagaggaagagagagaaggaagaaggaagggagggagggaaaactgagaaagtaacataccatcatttttgctgtagtttgttcataagaagcaaaatcacttggtccagcccacactctggggagatgattttctaactccatttgtaataatttattccacttttattagttggcattatacagtaagaaagagctgctgaagatttgcttgcaattggttgtctttaaactgagggtatattgtcaaagtactgtgctgaaaagttacctgtagtatagttatgtgattcattaaaataaagtttgtttctattatgtgcagttttagagttttgccacactctggttgattagtatattttctgttgcttttttgttttgttttgttttgttttgtttttgagatagggtctcgctatgtcacccaggctggagtccagtggtacaatcacagctcactgcagcctcaacctcgtgcacttaagcgatcctcccacctcagcctcccaaatagctggggctgcaagtgcacaccaccatgactggctaattttttaattatttatttatttatttatttattttagagatggggtctcactatgtttccccaggctgaccctgaactcctggggtcaagtgatcctcctgccttagcctccaagtgctggtattacaggcataagccaccacacctagcctagtattcttttttgaatatgtaaaacattaacataaagtcaaaactattaaaaaaaggtgtactcagaaaattgtcattcctcccctataccttctgcctcattcacaccacactctgtagataatcgatttcattagtttgtggtttatcctcactgtgtttctttttgcaaaacgcaaaaacaaaacctatacatatttatattttcttatgtcctcttctttcttacacaaaaggtaacacactatgtaggtagtcctggctttgaacagtttcactataaaaatatttgttactacagcttaaataacataagtctcctaaaaataattcaaattttagttaccatggtatattaactttgagtagttccataaaggacaaacttggctgctagcccttcagtccacagagcactttgaaaataacagatgagcaaaataatgtggccaatcacatgacttctttcaaagtatgtcagtgatcagtcactgtgtgcctataatttagttcatgcacagacagcaaagcatgtagttgtgttgccttccagtgataaacccacataacattttagaaaaatgtattaagaattggccagcaaagataaaagtgcagcaaagaaacaaaagtgataatgttttcagtgaaatttgaattgaacataaatggagttatagaagaaatagctgaccatgggaatgttcacactgctactttcaagaatctctagaagggcagctaaaggagcttagtgaaggtgaatttattgacatgaatgagaaaagtaattgtgatgaaaaggatgaagatgtcccagagaaagtaatgccagcaaaaacttcacattaaaggaactctcagatatttcaaagcattgaaacctccaagaataaataaaatgttggaagttgatccaaacttagaaaggagtatggcaacttgtcaagatgaagaaaaggtgcttattcctttttatttatttatttagagacagagtttcactcttgttgcccaggctggagtgcaatggcatgatctcagctcaccgcaacctccacctcctggattcaggcagttctcctgcctcagcctcccaagtagctgagattacaggcatgtgccaccacgcccggctaattttgtatttttagtagagacagggtttctccatgttggtcaggctggtctcgaacccccaacctcaggtgatctgcccacctcggcctcccaaaacactgggattacaggcatgagccaccatgctccacctgcttattccatattatatgttataggatgaaaagaggccaaactaatcttgacatgttttttacaaggaaataatcctccatggttctaatttttttttttttttttttttttttttttgagacagagtcgcgctctgtcacccaggctggagtgcagtggcacgatcttggctcactgctagcaccgcctcccgggttcacgccattctcctgcctcagcctcccgagtagctgggactacaggcgccggccaccacgcctggctaattttttaaaaaatatttttagtagagacggggtttcaccgtgttagccaggatggtctcgatctcctgacctcgtgatccgcccgcctcggcctcccaaagtgctgggattacaggcttgagccactgcgcccggtgggtctaatgttttaaattacactgtgttaaataaatattagtttgttggttttttttttagtttttttatttctctacaaatttacaaccaataagagtttttaatgctttgacaaaaaatgttaaaggtcatagtacaatcgcatttcttcccattgattattaacatcactttacatagtttcatcttgcattagcaattttgtgtgtgtgtttgtggttttaaggagcggagagtttaataggcaagaaggaagggagaagacagaaggaaggagctcccccttacagagacagagggagcggggctccaaaagaggaggtccccatctaccgcggataccagccaggtatatatgcagaggctggtggaggtgatgtctgatttgcatagggctcaggggattggtttgaccaggcatatcattcacgtagcccgagaaaaagctggccctcccaccccagccttttaatatgcaaacgtagggcgccatggatgttctaaacacgtggagatatgtggggggcagccatgtggccaggaacttgtggggcaagggcaagaaggctgtgggaatcgccaagttgaatggacctagtttctaatggcctgcatttgcatatcaaaggttgctggcctggctcctagagccggggctttaaaagaaacttttccggagatgctttaaaaaatgaaaacttcccaaggaccccttttcctgtctatctgcataaaataatttcttttattatttatttatttatttatttatttatttatttatttatttatttatttattttgagacggagtctcgctctgtcgcccaggctggagtgcagtggcgcgatctcagctcactgcaagctccgcctctcgggttcatgccattctcctgcctcagcctcccgagtagctgggactacaggcgcccaccaccacgtccggctaattttttgtattttcagtagagacgggatttcaccgtgttagccaggatggtctccatctcctgacctcctgatccgcccgcctcggcctcctaaagtgctgggattacagaataatttcttaataactcctaccacattcctccctgtggcgatatcaaactaactgctgttaggaggctttgggcgaccattgcttctggctacttcctgctgaaaaggggcgtctaatggagaacagcagctagggctcctcctggggttgatctaagggtcctcggaagaatggcgtccatgtgtggttcagtttacagcaccgtttggagtttgattgcttctaggcgagaagaaacaattcaagttatagtattgagtatacagagtccaaatatcaatacaagacatataagcaagagagtgcttaataaaggggttaaccaattccataaagaagactggaagtaattaaagagggattgtagccactcggggctgaagcccacattttccctgagcctgtcaataattttgatttgatttttaagtccctgtagatttgcctcttctttactacaggtgttaatcccaaagaagcatgtttcatttaaaaatgcattactggccaggcgtggtggctcgcgcctgtaatcccagcactttgggaggctgaggcgggagcatcatgaggtcaggagtttgagaccagcctggcctacatggcaaaaccccatctctactaaaaatacaaaaaattagccatcgtggtagtgggcgcctgtaatcccagctaattgggaggctgaggcaggagaatcgcttgaacccgggaggcagaggttgcagtgagccgagatcgcaccactgcactccagcctgggcaacagagcaaaactccatctcaaaacaaaacaaacaaacaaacaaacaaaaactgcattactaaatccaataaaaagtcctagtagactcagtgatagtaaaactttcatgcttcctttttgccagtaactattatccctgctataaggatactaattaagcaaaatacgacagcaatggaaactctgtccaatatttcagttagaaggtgctaccatggataaccctattgcaaatagtagagtgaggaaagcagttcccacaaatgtggtgtggtaggtaatttccatctaaaattttacttgccaacatatagaattcccctctgtgggcctacgaagttccttggttttattttcccaaacaaagaaacctccgggttacaggtaccttacttactttcattacctggcacaatttgcaaaataattgcccagaactagcatattgattcacattttcacattacccatccctttttcccccccaccaagctgcagaagatcaccacttgattcacaggaataagcagggccagggttagtctaaaatgtaggcaaaaagcttaaaaacaattaatgagactagggtttaatgacaaatgtatgataagctttggagcaaaatttttctctccagtcctcatttttggtaaaaactaattatgaatgaactttaatcttatacttggcctgattatttgcatgaagtgcagcaagaatggttatttctacataggacttttggattggctttgatgaaacactgttccacaaggaatttcagattagacttttaaagctgagcccagacatgggtttgtatcctctaatacctgtgagttgggttatcctctcctcttgaggtcccaagataaactcagagcttccagacctgttagaaagtgacattcttcactgaccacaggttaggaaccctgtgtggggactgtgtagacaaggtgtgaggccagttctccccaaggggcttttattggctctgcatgtcaagcttgattccttaaagggaaacacaccctttcagttaaagccttggcaaaataaccggtttttccaattgtgttctgttgacaaagaaaaatggattcttgctgcactgatgcgaacaactatattgccgtaagttaagagtacttacagatagtctccaaattttagaggaaccaggcagagaaaaatgaacatgctccaaattttgttcacagtagtataccttacttgattattaaaggccataaatagtttaaaataagtttcctttcccagtccatgcaccaaaatgatacggctctgatgagtggaggaacaacagggttcctggtcctcatgctggtttagataaaatgacacagacacatgtggagtggttttaaggagtggagagtttaataagcaagaaggaagggagaagagagaaggaagacgctcccccttgcagagacggagcgggggttccaaagctgaaagaggaggtcccccacattaacaatttttaaaataccgtacaactgcagaaaatgaggactgcctgtacatactgtttgacactttgtttttttttttaacttatcaactttattttgtttgtttgttttggttttgggtttttgtttgtttgtttgttttggagacgagtctcactctgtcagccaggctggagtgcagtggcacaatcccagctcactgcaacctccacctctcgggttcaagcaattctactgcctcagcctcccgagtagctgggattacaggtattcgccaccacatccagctattggttttggtttttgagacagggtcttgctgtgtcacacaggctggagtgcagtggtgtgatctcagctcactgcaacctctgcctcccaggctcaagtgatcctcccacctcagccttccaagtagctgggactacaggcatgcacaccatgcgcagctaattttttctattttttgtggagacggggtctcactatgttgcttaggttggtcacaaattcacagcctcaagcagtcctcctgcctcaccctcccaaagtgctgggattacaggcatgagccaccacatccagccttaccagctatattgaagtataatttatataacataaaatttgccttttaaaattatacagtgcaatgcattttgacaattgtttacatctgtgtaaccaccatgcaatcaaaatatagaacatttctataaccttcaaaagttccctcatgcccctttgcaatcaattcactacttctccagctccaggcaacaactggtctgcttcctgtcactataaattagtgttgcctctttcagaatttcatctaaatggaatcctataacatatactattttgtatccatcttcttttactccaaagttcttgaaattcattcatgttcctgtgtgtatcagcagcgtgttccatttgattgttgagcagtattgcattgtgtggatatatcacaatgtgttcattcattcaactgttggtggacatttgagttgtgtccagtttagtgctattctgaattaaagtgatgtgaacaatcatgtacaagtatttttgtaggcatattttttttatttctcttggataaataccccaaaacagaattgttttgggggtcatatgaaatgggaagtatatgcttaactttataagaagctgccaaactatttttcaaaatggtaatatcactttacattttcatgagcaatgcataaagcgttccgcttgctacattttctcaccaatgcttcctattgtcaattttttaaattttagcaattctagtgggtgtgtgatactatctcattgaagtttcaactgtttttccctgttgactagagacactgagcaacttttcatgtgttgtctatttgtatatcttcttgaagcattcgttcatctttaactgagctgaacgccttcttaaaattgagctatgggagttttaaaatatatccttgtagctgggcgtgatggcaggtgcctgtaatcccagctactcaggaggctgagacaggagaatcgcttgaacccaggaggcggaggttgcagtgagccgagactgcaccactgcactccagcctgggcaacagagtgagacttcatctaaaaaataataattatacatgtaattatatatgatttttatatatgtaatatatatattcttgatgtgagctctttgtcacatacatattttgtggatattttatcccagactatgacttgtcttttcattttcttagttgtgtcttttgaagagcagaagatgtaattttgataaagcccaatttattttttcttttatagtttgtatttcttatgtcctattcaaaaactccttgcctactgaaaacttatgatgattttctcctatattttcttttagaagttttatagttttaccatttataatttggtctatgaatccttttgagttgatgtttatgtatggtgtatggtgtgaggtaacaatgaagattcatatttttttccaaaggaatatccaattgtctctttggaaaaatatgctgagaaggctatcttttccccaccaaataatcttagcaccttaatcaaaaatcatttggccatggacatatgtaggtgtgggttttttctgggctctctgtgttagatggatagatagacagatacagatatataactgtgtttacacatatgtaactgtaaacacagttatatatctatatatccaccaacagttgaatgagaataaactattgttataagcatatatacacattgtatatatatgtgtacatatacatattgcatatgtatgtatacatatatacacacaaagtatatatatgtatgtatacatatatacacacttaaagtaatggcctccagttcgatccaagttgctgcaaaggacattatttcatgccttttcgtggctgagtaatattccatggtgtatatatatatatgtgtgtgtgtatatatatgtattatgtatatatatatgtgtgtgtgtgtgtgtgtgtgtatatatatatatgtgtatatatatataccacattttctttatccactcattagtcgatggggacttaggttggtttcacatttttgcaattgtgaattgtgctgctataaacatatgtgtccaagtgtctttttcatataattacttattttcctttgggtagatacccaatagtgggattgctggattgaatggtagatctgttttttgctctttagagaatctccatactgttttccatagaggttgtactaatttatattcccagcagcaatgtgtaagtgttctcttttccccacatccacaccaacatctattgttttttgactttttaataatggccattcttgcaggaccaaggtggtagctcgttgtggttttaatttgcattttcctgatgattagcgatgttgagcattttttcatatgtttgtgggccatttgtataccttcttttgagaaatggctatttgtgtcctttgcctactttttaatgggattgtgttttatttttcttggtgatttgttagttccttgtagattctggatactagtcctttgtcagatgtgtactttgcaaagataatattttggatgttatatttccattataatttagttcaaagtattttctaatacaccttgcaatttcttctttgacccatggattattttaaagtttgttattttgtttgtttattttgagacagagtttcactttttttgcccaggctggagtgcagtggcacaatcccggctcccagattcaagcgattctcctgcctcagcctcccaagtagctgggattacaggtgcccaccaccacacccagctaatttttttttcttttttttttgagacagagttttgctcttgttgcccaggctggagtgcaatggcacgatctcggctcactgcaacctctgcctcctgggttccagcaattctcctgcctcaacctcctgagtagctgggattccaggcatatgccaccacgccaggctaattttgtatttttaatagagacggggtttcttcatgttggtcaggcgggtcttgaactcccgacctcaggtgatctgcccgccttggcctcccaaaatgctgggattacaggcatgagccactgcacccagtccaattttttgtatttttagtagagatggggtttcatcatgttggccaggctggtcttgaactcctgacctcaggtgatccgcctgcctcggcctcccaaagtgcagggattacaggtatgagccaccatgaccagcctaaagtgtattgtttagtcaccaaatatgtaagtattacccaaatatatttgtcactgatttctaatttaattgtattgtgatccaaaaatatacattgtatagtttctattcttttaaattcgttaacatttcttttatggcacagaatatggtctatcttggtgagtgttgcttacacacaactgtgtaactgaaaactgtgtattctgcttctcgtggttgttgtatcctataattgtcaactagatcaagttagtaagagtgttgttcagtgatcttttcttcttcagtgtttactgtatttgctaatcccatccagtgaagtttccatttcatatattgtatttttcacttttagaagttccatttgactctttcatttccatcctcaattatcttcatatttttctttaaatttttgagcacatttataatggaggttttaaagtccttgtctgctaattttgtcacctctgtaattcctatgatgattttcttcctggcttggggtcataatttgttgcttatttgcatgtctaataatgtttttattggacagcagacattgtaaatgttatatttttgagtgtttggattttgtctttctttaagaactattgcagtttgttttggaaggctattatgttttttgcagatcaggttgatcttttcaaggcttgtttttaagctttgttaggacaggtctgtagtaacttttgccttgggctaatttagacctaccacttaattctgacttttttgattaatctgagtgttcagcagggtctctttattatggctaaatgaaattcaaacattttccagccctatgtgaccatcaagaattcagctaatagctccctggcagttcttcgcccagctgcagaaaagtgtcagtgcactctatgtatgctcagattattatttagccaaagacttggggatccatattaatattcctggagttctttgtgtagctccattctctttagtactctatcccataaattctggctgcctcaatctcctaatctccccaaactctaatatctattcctcaactcagcaaaaccatggtgttattcttggatttcccctttcctgccccacagtctgaaagttgtctccaggcaaaaaaaatggagatcctagtttgcggatcctcatttccttctccttttttttttttttttttttttttttttgagatggagtctcgctctgtcacccaggctggagtgacgtggcgtgatctcggcttactagaaactccggctcccgggttcatgccattctcctgcctcagcctcccgagtagctgggactacaggtgcctgccaccatgcccggctaattttttgtattttgtttagtagagacggggtttcaccgtgttagccaggatggtctggatgacctcgtgatctgctcacctcggcctccaaaagtgctgggattacaggcatgagccaccgcgcccggcctgcttctcttctcttatgggttagaatcctgcactgtcttttgaacaaatgtctaaaagcttttatcacacattttgatccacttcccagttgttatagtggtatatctggtttcacatgactgaaaggaaaagttttcaccttgctttttgtactaataatatatcctggaaatcattctatataaatttatagaaatcttcatttttaaaatagcttcataaaactccattgtaaaaaccaggtgcagtggctcatgcttgtaatcccacactttgggaggccaaggcgggtggatcacctgaggtcaggagttcaaggccagcctggccaacatggtgaaactccgtctctactaaaaatacaaaaattagctgggtgtggtggtgggcgcctgtagtcccagctacttggaaggctgaggcaggagaattgcttgatttcaggaggcggagattgcagtgagctgagattgcgccactgcactccagcctgggctacagagcgagactccgtctaaaaaaaaaaaaaagcaaaaaaaaaaactccattgtatgtgcacatatcattatctgttcaacccatctatgacttgtcatttaggtagtttccatccaatatttttgcaatataaaaaatgctaatgaagaacctgagatatatatatatctatatatatagatatatatgtttgttgttgttgttgttatttttgaagtatgtacgtataataaattcctaatagtgtgattgctgcatcataaggtaaaggcatatgtagttttgttaaatatagctattccccatcttgcattcctacaaatagatgagaatgtccattgtcccatagtctcctttgcagagtatattgtcaagctttttaattgttgccaacctgatgggtaaaaagatatctccaaataattttaattaaaatttctcttattatgaatgaggttaaatagtttttcatatgtttaaaagccagtttatatctttttgtttttttagagacaggaatcttgttctgttgcccaggccaaattgcagtgatgcagtcatagctcactgtagcctcgcactcctgggctcaagcaatcctcctaccttagcctcccaagtagctaggactacagatggatgccaccatgtccagctaatttttttatttttttgtagagatgtgaggtctcactatgttgcccaggcttgtcttgaactactggcttcaagtgatcctcccacctcagcctcccaaagtgctaagattacagccatgaaccaccacaaatgaccctatatatttttttgaattgtctgttcatgtcttattttcatttttctagtagttttttttttaagtgttttagcctaaatttgtaaaaagtttaggggatatatgaagggactctaaatgtttatgaagaaatttaattaaaagataaaaataaaaatataagctttatttttcaacatgagctccatcaagttcaaggcacttttgtaagcaatgatactagccatttagttcacccctaaagaactgagagtcctgggaatttagccatgtcaatgcagtattttttatattggttactgaagaaaaaatgggtgccctttaaagttgtaagattaggaacaaaaacaagtcagaagaagccaaatcagcactgaaaggtgggcacttaatgattacccaagaaaactctcaccaaattgcccttgcttcatgagaggaatgagcgggagcattgtcgtggtcaggaaggattctggggaagttttcccaggcattttttctgctgaagctttggtaactttctcaaaacactctcataataatcagatcttatcactctttggccctccaggaagtcaaccagcaaaatgctttgaacatcccaaaaaagcgcttgccatgacatttgctcttgaccagtctgcttttgcattggtcaaatgccaccacttccacctcttgtgctttgttttcaggatcagactggtaaagtcatgtttcatctcttgttacagtttttttttttttaagaaacccttcaggatcttgatcacatttgtttaaaatttcaactgaggctgggcccagtggctcatgcctgtaatcccagcactttgggaggccgaggcgggcaaatcacgaggtcaggatttcgagtccatcctggctaacatggtgaaaccccatctctactaaaaatacaaaaaattagccgggcatggtggcaggcacctgtagtcccagctactcgggagggtgaggcaggagaacggcatgaacccaggagacggagcttgcagtgagctgatatcatgccactgcactccagcctgggcaacagagtgagactccagctcaaaaaaaaaatcaagtgaaaactctggtcttaaactgcagctgatctattttatttttattttttttcagacacagccttgctctgttacccaggctggagtgcagtggcaccatcatggctcaatgcagccttggcctcgtgagctcaagcaatcttcccacctcaggctcccaagtagctgggactacaggcacatgctaccatgcctggataatttttttgcagctaatctagatgtaatggttttggcacccatctaatggaaagtttgctcaactttaatttttcagtcagaattgtgtaagctgaaccgagatgtctatggtgttggctattgtttctgctgttaattgtaggtcttctttaattagagcacagacaagatcattttttttcctcccaaattgatgtagatggtcttttgctgtgggcttcatcttcaacattgtctcatcccttcttaaaacaagctagctacttgtaaactgccgttttctttggagcattgtctccataaacttttcacaaaacatcagtgatttcaccgttcttccactcaagcttcatcataaatttgatgtctgttcttgtttccattttagcagaattcatgttactctgataggggctcttttcaaactgttatcttattcttcttagtgcctcaaactagatcctattcagacatggtataacaagttagtatgggtttattttggtgcaagaaatattttgaaatccacacatttttttcataatatgcattttccatgaagtttttgaaaactccttgtattaggaatattagtcctttgtccagtaaacagactgcaaatattttctcacagctcatcatttaccttttggcatttttttgcaatgcaatttttttccctttgtttttgttttttgtgtaatgaatcaatgttttcttttttttttttttttagaccaagtctcactctgtcacacaggctggagtacaatggtgcaatctcagctcactgcaacctctgcctcccaggttcaagtgattctcatctctcagcctcccaagtagctgggattacaggcacatgccaccatgcctggctaatttttgtatttttagtagagatggggtttcaccatgttggccaggctggtctcgaactcttgacctcaagtgatccactcacctcggcctcccacagtgctgggattagagacgtaagccactgcccccggccaaatcaacgttttcttatattgcatttaggttttaagtcatagttagaaagcctttccccacacctaggttatagaaacattcattacttttttcttccagtgctagtacttgcatggtttttggtttccacatttagatccctgatctaattggagtttattcttttgtgtgctgagatatggatctgattatatcttttttcccaaatggctatccagttgtcccaatgccatttattaagcacttcatctttgtcccagtgatttgagatagcatctttatcatgtaccaaacttctatagtgccagaagatttttattttttttagacagggtctggctctgttgcccaggctggagtgtagtggcacaatcccagctcgctgcaacctccgcctcacatgctcaagtgcccgcacctcagcctctcaagtagctgggactacaggcacatgccaccacaccaggctgatttttatatttttttgtagaatgagatttcaccatgttgcccaggctggtctcaaactcctgagctcaagaaatccgcccacctcagcctcccaaaatgctaggattacaagcatgagccaccacacccggctgccagaaaattttaatgatcagaaaaccacaattctttcttcctctgttatatgttgaagtaaaatacttcatttagaaaactaagccgggcacagtggctcacacctgtaatcccagcactttgggaggttgaggcaggcagatcacctgaggttaggagtttgagaccagcctggccaacatggtgaaaccctgtctctgctaaaaatagaaaaatttgctgggcatggtggcgggtgcctgtaattccagctacttgggaggatgaggtaggagaattgcctgaacctgggaggcagaggttgtggtgagccgagaccacgccattgcaccccagcctgggcaacaagagcaacggtaaactccatctcaaaaaaaaaaaaaaaaaaagaaagaaaaaagaaataactcagccatacaaggctacccatttggtgagaactaataataagttagatagcaaggtaatagcaaaatgtgggtgcaaaattaaagcaagttatttctgaggagaatgtaggtctcatggaagattttcatgtggacaaatttagtaaattttttgcaggtagtttcctgacatatttaacatttgtgatatagtaaacaataagaaggtactaaaggctgggcgcggtggctcacgcctgtaatcccagcactttgggaggccgaggtgggcggatcacaaggtcaggagatcaagaccatcctggctaacacggtgaaaccccgtctctactaaaaatataaaaagttagctgggcgtggtggcgggtgcctgtagtcccagctactcgggaggctgaggcaggagaatggcgtgaacccgggaggcggaacttgcagtgagccaagatcaagccactgcactccagcctgggcaacagagcgagactccatctcaaaaataataataataataataaggtactaatatgatccagactagaagagaatagcactaaaatgggagatggggtaaacctgtggttttttttaccttaggcttttgacttccaaaattattgtttttgctgggtgcggtgggtcactcctgtaatcccagcactttgggaggccaaggtgggaggattgcttgagcctaggagtttgagaccattctaggcaacaaagcaagaacctgtctctaaaaaaatttaaaaattagccagaaatggtggcacatgtctgtagtcccagctacttgggaggctgaggcaagaggattgcttgagccttttgaagttgaggcttcagtgagccatgatcaccccactgcactccagcttgggcaacagagcaagaccccatctcaaaaaataaaacaaaatagactgggcacgatggctcacgcctgtaatcccaccactttgggaggctgaggtggatggatcatgaggtaaagagatcgagaccatcctggccaacatggtgaaaccccgtttctactaaaaatataaaacttagctgggcgtggtggtgcacacctgtagtctcagctactcgggaggctgaggcaggagaatcgcttgaacccgggaggtggaggttgcagtgagccaagattgtgccactgcactccagcctggcgacagagtgagactctgtctctaaataaataaataaataaaacaaaataagtaaaataaaataaatgtttgtagttccaaaatattttgatgacataatttcttcttgttctaataaaactacatatgcattggtcctatgacctagtaatcacactattaggaatttatcataaatacacacctcaaaaattacaaaaatacatatataccagcttatttattacagcgttatttgtaattgcaaaaacattgtagatagaatggaggtcacataaaacttattcttaagattcagaccgggtgcaatggctcacgcctgtaatctcggcactttgggaagccgaggcaggcagaccacccgaggtcaggagtttgagaccagcctggccagcatggtgaaaccccatctgtaccaaaaatacaaaaattagctggtcgtcgtggcacgcctgtaatcccagctactcgggatgctgaggcgcgagaactgtttgaaccccggaggcagagactgtagtgatctgagatcatgccactacattccagtctgagcaacagagcaagacttcgtctcaaaaaaaaagatcatagatcatcttatcaaatcaaagtatgcaaaatattcaagtaaacttcagataaatatgaaggctaaaccattcagcttcttcaccaaacccttgaatgtcccacctgtctaaatggagatacatgtttgtttgatttattggttaactgtttttattccatttttcctcaaatgatcccataatttgaccttaggaagctgttcaaatagacacattaggttgaatggaaagactactcgatgatatttaggattttaagaggattttatgtattttttccttgtgtgcaataatttaatagcatcttgaataggattttctgatattactaaccctctgggaataatattaggtaattagacagttagctaatattaaaatatgtatcaggtaatatttattgagagtttcctctgtgccaagcaggatcaacttcataggcaggcgacctgtgcggggacacagggcttcatgcttagataggcccccttgctttgaaggcccctaccctttggttagggctctgctgttaccatcttgaaattcttaataatttttattttatttttttgagtcagggtcttgctctgtcgccctggctggagtgcagtggactcactacagtcttgaattcctgggctcaagcaatcctcccacttcagccttctgagtagttaggacgacaaacacacgccaccatgctcagataagttttttgtttgtttgtttttttgtttttgtttttgttttttgtagagatgggactgtccctatgttgctcaggctggtctcaaattcctggcctcaagtgatcctcccacctcagcctcccaaagtgctgggactacaggcatgagccactgtgcctggtcaatcatttttattaacaagcccaagccctcttttttttttttttttttttgagacagggtctccctctgttgtccaggctagagtgcagtggtgcgatcttaccttcactgcaacctctgcctcctgggttcaagtgattctcctggctcagcctccctagtagctggaattacaggcacccacccccatgcctggcaatttttttgtatttttagtagagatggggtttcaccatgttggcaaggctggtctcaaactcctgacctcaagtgatccacccaactcggcctcccaaagtgctgggattacaggtatgatccactgcgcccggcctccaagccccctatttttattttgcactgaccctacaagttacgtagctaggcttagttatgtttttagcaaggaaagtgtataatctcatgtaccttttgaaagattactcaggtctctgcatgtgaaatggaatttagggaatgcaagagagggagtaaaaataacagcgaggaagctatgatagcatttaaggttgctttgactcaggggtagcagtagatagggtaagtaattgatagtttcaaaatatattttgggagtagtaagcattggtatggattagtaatatactggatgtggggatgcagaaaaaaatattaaaaattacttctgaaattctggctggaatagaagtgccacttaccaggtaaggaaggttggagacataacatatttgagggtgtggtcaaaagatgagtttgacattatgctatgtcatataaaagacatataaaagactacctattttataattcctttttaataaaatattcagaaaaagcaaaactgtggttgcctgaggctgaagctaggaagattgactacagacaagcatgagggaaattttgggggtgatgagagttttctaaaactggattgtggggttggttgcattactgtataaatttattaaaaatccctgcatcgtataggggcactatattgtatgtagaaagctgtgaaaagattttaaaaatgattgacatgtctgtggttatatcaatgagtactattattattcccattttatacataaagaaaataaaagagaagttaaaaataaaagtttcatggttacatagctactaggtgtaatatccagtattggaatttgaatctttttgacactaagaccttactctcgatcatataatacattcactttctattttaaagttatattatagccgggcacagtggctcacacctgtaatcccagcactttgggaagccgaggcaggcagatcacgaggttgggagatcgagaccatcctggctaacacggtgaaaccccgtctccactaaaaatagaaaaaattagccaggcgtggtggcacgcacctgtatcccagctactagggaggctgaggcaggagaatcgcttgaacccagaaggcagagcttgcagtgagacgagatcgtgccactgcactccagcctgggtgacagagtgagacaccatctcaagaaaaaaaaaattatattataaatgctgcatctcattggtcagaagctctcttgaaattataaaacaaagaagaaaaaagataaagactgggaaattgtgttgaatcagtatataaatcctgtatactggtccttccatttcccctagaaataagtgatacaggccaggcgctgtggctcacacctgtaatcccagcactttgggaggcggaggctggcagatcacctgaggttgggagttcaagatcagcctgaccaacatggagaaacccccgtctctactaaaaatagaaaattagctgggcatggtggcacatgcctgtattcccagctactcgggaggctgaggcaggagaattgcttgaacccaagaggaggaggttgtggtgagccaagattatgccattgcactccagcctggggaacaagagtgaaactcaaaaaaaaaaaaaaaaagaaagaaaaagaaaaagaaagaaggaaggaaggaaggaaagaaagaaagaagtgatacaacaagttacagcatctttgtttattatccactgtgagttgtattaccacactttacttggctctttggcaaactatattatctcttcagatcactagggctaggaaggcccactggtaacttgaaggagtaaatgtatcttctaaaaaatgcttacttccagggagattggatccacacaagtgaatacatatatagtccttagtgtatgctatgattattttactatgtcagtagcataaagattgctatattaataagcattaagtgcctgctgtgctagacagtgaggatgcaagtggccaccaaaatagcatggtccctgccctcctggagcttctttttttcttcttcagtgggggaagcagatactttgcttatgcaaaaataattataaaatttaaagttgtgccaagttcaatggaaaaaatataaggtgttctgagagagcataacaaaggatcctggttttaactggggcctaatggaagacctctattaggaaataacatttaaactaagaccagacagacctgtagaaattagcaaagcaaagggagggaggaaaaagcagctttcctggcaaaggaacaatttgtgtgaaggccctgagacagggaagggctggggttctgaccaccctccaagtggtgcaatggaatatagtgagagagggagaagacatgagaacttggatactatgcaaaggatttggtattttaattcaagagcagtatgatgctactgaggagcagctggacaattgtgtgatccaattaaaattttaggaagatgaacctcgctattgtggagaatgcatacacaagggttctgttggttcatgaagaggtcttaagaaaactatgagctgggtgcagtagctcaggcctgtagtcccatctacttagaagtctgaggcgggaggatcccttgagcccaaggagctggaagttacagtgagctatgattattccactgtactccagcctggatgacagagcgagatcctgcctcagaaacaaaaaccaaaaaacaaacaacaacaaaaacaacaacaacgaaaatctcagaaaactacaggccttattatcaagaaaatgacaggccttattattgagaaaactacttacatttttaaaagctgattttcaaaaaccagattgtgaattaagtgatgctgaataggggaaaaaaagactgataaaccagtgtatctctgaataacccactagatcagtgcttgtcaaactttaatgtgttttcaaatcaccctgatgttttgttaaaatgtaagtcatgtctcagtaggtctagaggagggcatttctgcatttctaacaagctccccggtgatgcctagaccattggtcctcacactttgagtagcaagtgattgggctatactctttattctaaattctaaatgtattctatcttctaatgcctatcagccctcttgctggtctggctaattatcaaacttgagcatttaaaactgggggttttcagagattaattgaagtgttaaagacatggaaatataggtcacatatggcttttcatctcttccggaaatatcctatatatccttacttcttttctacctacctaacctatgtgcctaccccttcacttatgttcaaggttctattatacttcaaaaggactctatgcaatcaaagtgatgtccaagacaaatatacagaaatagtatgaggctctaacactttacatctaatggagtggtttgcatcattaattgaggcttactctgtgccaggcactttacctgccttcttcatttaataggataggagcaggaactcttagaggttcatttcttgttcaaggatatacatctcatctctggcttatatcacagtggactcttttattcactatcctaatcattataattttgtttggtgacaacaattctaaatgcagaaaagttaaggctctttattctgtgactaaaggctttgtattttctaaagatttgtggagctttgctgccattatttcaataattttataaagatcctaggtggtaaataggcctggctttttttctttttgaaatcttctccgtcttcttcttcattagcagtgcaacttcttgtggcatatggtacccaagatcttgggaaaaggattgatcaagtaaagggaaacgatagagagagtgtgctctacaactgagatcatgctccttgtgaaagacagggtagggaaatttcttattgctccctggttcttaagaaatgagagctaacaatgacatccagttttaaaagaaataaaatctgaattgtacttttaaattttataagccagagttaaaccaatagattgtaactcctgctaatttgatagtagctccagataatgaggaagtgacagggaatgctaatttcatttggtaagagataaaactgaaattattaatgtctccacggaaatgctaaatgcctccttacaagtagggtccggctaattgtctgtcttccaacaagccagatttgttggtgtttttccagacaatgttgtgtagttttcggtttggttcgatcccctttcttgtgatcaaagaaagtgattcaaatgtttaatgagtcttgatttggattggagacttgcagaacggctagcctcacagccccaaggctggctttccctaaggtaggtttcctatgcaccgatactggcaaggcgctttggctggaaactctggaaggaagccaaaggaaagtgaagttcctggcgctagcgcgtgtcctgctcagagagcccggcgctagctcattcttcgtgcagttattggctgggactctgtgtgccgctgtcggccaatgaagacgctggagatcgggcccctgcccgtcccctttctgcgccccgggatgaggcagagactgaacagccggcgagcaaatcaacggcatccagaaagccatgtcggactcggcgcccagcgcccaagcgctaacccgctgaaagtttctcagcgaaatctcagggacgatctggaccccgctgagaggaactgcttttgagtgagatggtcccagaggcctggaggagcggactggtaagcaccgggagggtagtgggagttttgcttctgcttggtgccttgaacaaggcttccacggtcattcactatgagatcccggaggaaagagagaagggtttcgctgtgggcaacgtggtcgcgaaccttggtttggatctcggtagcctctcagcccgcaggttccgggtggtgtctggagctagccgaagattctttgaggtgaaccgggagaccggagagatgtttgtgaacgaccgtctggatcgagaggagctgtgtgggacactgccctcttgcactgtaactctggagttggtagtggagaacccgctggagctgttcagcgtggaagtggtgatccaggacatcaacgacaacaatcctgctttccctacccaggaaatgaaattggagattagcgaggccgtggctccggggacgcgctttccgctcgagagcgcgcacgatcccgatgtgggaagcaactctttacaaacctatgagctgagccgaaatgaatactttgcgcttcgcgtgcagacgcgggaggacagcaccaagtacgcggagctggtgttggagcgcgccctggaccgagaacgggagcctagtctccagttagtgctgacggcgttggacggagggaccccagctctctccgccagcctgcctattcacatcaaggtgctggacgcgaatgacaatgcgcctgtcttcaaccagtccttgtaccgggcgcgcgtcctggaggatgcaccctccggcacgcgcgtggtacaagtccttgcaacggatctggatgaaggccccaacggtgaaattatttactccttcggcagccacaaccgcgccggcgtgcggcaactattcgccttagaccttgtaaccgggatgctgacaatcaagggtcggctggacttcgaggacaccaaactccatgagatttacatccaggccaaagacaagggcgccaatcccgaaggagcacattgcaaagtgttggtggaggttgtggatgtgaatgacaacgccccggagatcacagtcacctccgtgtacagcccagtacccgaggatgcccctctggggactgtcatcgctttgctcagtgtgactgacctggatgctggcgagaacgggctggtgacctgcgaagttccaccgggtctccctttcagccttacttcttccctcaagaattacttcactttgaaaaccagtgcagacctggatcgggagactgtgccagaatacaacctcagcatcaccgcccgagacgccggaaccccttccctctcagcccttacaatagtgcgtgttcaagtgtccgacatcaatgacaaccctccacaatcttctcaatcttcctacgacgtttacattgaagaaaacaacctccccggggctccaatactaaacctaagtgtctgggaccccgacgccccgcagaatgctcggctttctttctttctcttggagcaaggagctgaaaccgggctagtgggtcgctatttcacaataaatcgtgacaatggcatagtgtcatccttagtgcccctagactatgaggatcggcgggaatttgaattaacagctcatatcagcgatgggggcaccccggtcctagccaccaacatcagcgtgaacatatttgtcactgatcgcaatgacaatgccccccaggtcctatatcctcggccaggtgggagctcggtggagatgctgcctcgaggtacctcagctggccacctagtgtcacgggtggtaggctgggacgcggatgcagggcacaatgcctggctctcctacagtctcttgggatcccctaaccagagcctttttgccatagggctgcacactggtcaaatcagtactgcccgtccagtccaagacacagattcacccaggcagactctcacggtcttgatcaaagacaatggggagccttcgctctccaccactgctaccctcactgtgtcagtaaccgaggactctcctgaagcccgagccgagttcccctctggctctgccccccgggagcagaaaaaaaatctcaccttttatctacttctttctctaatcctggtttctgtggggtttgtggtcacagtgttcggagtaatcatattcaaagtttacaagtggaagcagtctagagacctataccgagccccggtgagctcactgtaccgaacaccagggccctccttgcacgcggacgccgtgcggggaggcctgatgtcgccgcacctttaccatcaggtgtatctcaccacggactcccgccgcagcgacccgctgctgaagaaacctggtgcagccagtccactggccagccgccagaacacgctgcggagctgtgatccggtgttctataggcaggtgttgggtgcagagagcgcccctcccggacaggtaaggtttagcaagtcatgcttgaccctgttagtgcttttttattcctacatcatattgaggaaggaatggagctgtttttttagtgatgaagatgttttcctggtgatgcattcacactttcaactggcccttcctagatcaaagttagtgcctttgtgagatggtggcctgccagagtgtggtttgtggtcccatttcagggggaagatacttgactcatctgtggacctaattcacatcctcagcactcttttgctatcacaactaaccaatcttgctaagggatggttaagctaaaacacaagatctcagcgatcagagtttagcttggtatcatttacattaggaataagctgctggatacctctaaccagtggcagcttctaggaatacaaaaactacctcattcctccacctttcaagtgattgtgacatttgtattaaaactaatagctttttgataattttcctttgtttatacagatcgtgtacctcattctcagataattttttatgaatgaaatgaaattccaggcatcctttaaattttatttcaagcattctactggaaatgatgtgcaccctgcttacaaaatatttttaccttataacagtaatgcatgtttgctagaaaattcagaaaatacagaaaagtatttaaaaaattaaaactataatctccaaacccaaagataaccatttttaattataaaagtaataatttatttcaaaaataaatctaggcaacccaagaaaacataaagtagccagactcagtggtgtgcacctgtagttcttgctgctcagtgcctgaggtgggaggattgcttgagcccaggagttctgggctgtggtgcactatgctgatcaattgatcaatccactgtctgcactaagttcagcatgaatacagtgacctcttgggagggcaggaccatcaggttgcctaaagaggggtgaactggcccaggttggaagtggagaaggtcaaaactgctgtgctatccagtagtgggatgacatctgtgaatagccactgcactccagcctaggcaatatagggaaaccatgtctctttaacaataacaacaacaacaacaacaatcccagaaactacaaaaggagagtctttttggtgcctccagtgttagtccctgtccttccagccttatttttcttaagtatatgcacaatgtgaaaggtagataaattcatatccttagacaggtaaagcattcattaattcagggtggtatgcaaggatactatccaaggcatggtatccatgcaaggtgactgcaaggcctttgccctggagagaaccctatacatactctcaactgtaggagaaacactgttattttgttactcagtgcatcattgctatcaactcttggatttggcagttagtcaaatgaggttctaccatttaccaactaggagtctgtggccaagttactcaatctcctttctaagcctcttcctcatatgcaaaaagggaataataagtgttttataagattcatgcatgatataatgtatgcaaagtgtttagcatggtgcctggcatatcataactgttaaacaattattagccagctcctagcattttgggaggctgaggcaggcggattgcttgaggccagcagttcaagaccagcctgagcgacatagtgagatcctgtctctacaaaaaaaaaaaaaaatgtgttttcattagctgggtgtgttggcatgcacctgtggtaccagctacttgggaggctgaagtgggagaattgcttgagcctgggaggttgaagctacagtcagctgtgattgcaccactacacttcaaccatggcaatagagtgagaccctgtctcaaaaaaaaaaattatcagctattactataattatttttattagttcctcactcacctaaaatctcaaacacaccttagaaatacacatatgagaacaaccaaaaatgacaaagtagaagcacatatgaaaaggctaagaaagcatgaaagccagcaagaaataactgccgctcttctggtcagcctggaaagcaactggcattttccctagaacaatgttttcaaacttggttgcacattaaaatcacctagagaccttttaaaaattctgaaacccaggccacaccccgacaaatgaaagcacagtctctgggggtgggacataggcatcattttttgaaggtccccacttgatcctaatgtgcagacaaatttgaaaaccacagctttgggaggctgaggtgggtggatcataagatcaggagtttgagaccagcctggccaatatggtgaaaccccgtctctactaaaaatgcaaacattagctgggcatggtggcgcatacctgtagtcccagctactctagaggctgaggcggaagcatcagtgagggagaatcagtgaacccaggatgtggaagtttcagtgagcccagatcacaccactgcactccagcctgggcgacagagcgagactccacctcaaaaacaaaaagaaagaaagaaaaaagaaaagcagtactctggaacctaccaatccatcatttagcatatttgtgaagtaaagtgttattctggtatttgcagaaccagaatccagctttattgggccaggcccaatttttttaaaaaacatggtaaggtctcccagccttaaagtattacatagcatagctctaaaagatcactgtaggaagacataaaatggtatttcagtcatctaagggaaaaaccttcctaaagcactagcccctggacaactattatttaaacatctacagctgttcaatagatattgggttctttttggagggatgtgacaaaattcttgtataattagattgtgatgatgattgtatcagtttagtacatgtaaatacactgaaaaccattggattatacactttaaatatgtgatttgcatggtatgtgaattatgtctcagtaaaaatctagagatggggctgggctcagtggctcacgcctgtaatcccagtacttagggaggctgaggccagcggatcacctgaggccaggagttcaagaccggcctggccaacatggtgaaacttcatctctactaataatacaaaaatcaggccgggcctggtggctcacgcctgtaatcccagcactttgggaggcggaggcgggcggatcacgaggtcaggagtccaagaccagcctggccaacatggtgaaaccccgtctctactaaaaatacaaaaattcaccaggcgtggtggctgaggcaggagaatcgcttgatggtggaggttgcagtgagccgagatcgcgccactgcactccagcctgggtgaaagagcgaaactccatctcaaaaaaaaaaaaaaaaaaaaaatcagccagatgtggtggcaggtgcctgtagtcacagctacttgggaggttgaagcaggagaatcgctttatctcaggaagcagaggttgcagtgagccaagatcatgctgttgcattccagcctgggcaacaagaacaaaactcactccatctcaaaaaaaaaaaaaaaatatctagagatgggagaatcatatggctggcataaaaaggtcaagtcaaagatatgtaagattaaggctttacgatgctccagttctagtaaaacagaccaggtacttgttttggtgtgaaattgccaatataagtatagtactgtacatattagttgtttagcttaggtaagtcttttaatctctttaaactccagtttcctcatctataaaataaagagaatatctactttgcaaacttgttgtgagagtgaaaagtaatgcatataaagtccctgtatggagcaagtactcaataactatttgttgaactaaaaatgataatactgatattcaccatttattagcatccctatgtgccagacactgtaaacaattaaaagttatcattctggtacccagagtacagtatgagacagacatgcaaaaaaaaaaaaaaaaaaagataatggagatctgcatagcataagatgcagtgggaccaaacgggaaaaaacacctaaatgagcctggagaaaggaagaaatgatagaggtggtgatgcttgagctatgatctaaaggttgagtagtagcttgtcagacagtaaaggggaaaggacagggcagggaggggccattgcaagaaattccatgcagagggattatggtatttcattatcactgaaccttaaactgtgtgtgtggccgggtacggtggctcatgcctgtaatcctagcactttgggaggccaaggtgggcagatcacttgaggtcaggagtttgaaaccagcctggccaacatggtgaaacctcatctctattaaaaatacaaaaaattagccaggtgtggttgtgggtgcctgtaattccagctacttgagcagctacttgagaggtcgaggcaggagaattgcttgaacccgggaggcagaggttgcaatgagctggtgtcaggccactgcactccagcatgggcaacagagagagactccatctcaaaaaaaaagtgtgcgtgtaaaacagacagtctttgtaggagatgaggtgaagcaagtaggcaggagttagatcctgagttacctttgggccaagccaaggagtttttattttattccatatagatgacagtcactgcagaaatttgaactgatatgcatatatcatgaggtttttttgttttagaaatattattctgtcagtcataagtgaagggactggggacattgggactggaggcaaagagatcttatctctttgcaatagtttgaaagctattgcaatatttgaagagaagattgataaatgcttgaaccagcacagtggcagtacagatggagggagctgactacaataaaatcatcaggacttgttgattgacatgatataggaagtgagggacagggatgagtcaaggctgatccccctagatcctgactaaggaagctgggtggttgacagtgccattcacagagacagtgaattctggcataaacacctaataggtcaggctggtttacacctccatcattcccatgggagaaggtatagaggggtgtgtgtttgtgtgtgtgtgtgtgtgtgtaaaagaacacagaaagccagattcctctttttgacaccagaatattggttcccaccatagtcaaaaggatattcctgaggatcgaggcttggaaaaatattggggaaggataagaactccagttgttgctgctttttttggcagccagtgtaacctaggtaaggacttggttgaattaagaaatttcatgtccagatcaggatggatttttctatttctctgagctctggtgtgtttcccactcagattgcaggtcgtaggtacctacggtgtgaattgtgttgtgtttctgtgcttgtgcaagggagtagctaggttgctgggaggtctggatgagggtgggggtggggtgagatcaagtctccagctccaagaggtcccctggggctaagtgaaaagcttgctcttttgaaatggtcttcgttggtaattaacaaaagatcaagaataccttggtgtcagataaagggaatttgtaggcacaatgctgttggtagctgatctcaatcattcaaggaagctattaaatctatgaacattagcattctgccaggtaaagagatctggtccttagcacctcccagacacactgattctttactgttttgaaacatctccctctcctggcttcctccaccccgcttccatactgtccttgaaatcaatgaatggtaatttagtgtatctagtgtatcactagcaaatgtctgaataagaaaggtttggtttccgctgtgtctcctgttacaatgagaacatgtactgcataaatttaattggctacgttaatgtgtaagccttttctgcaaagagatggatccgtttctgaatattctgcagaagggcagagttttgagtatatggcagtggttctaattagcagttgctccaatacaatcagactgagacggaagctactcatttagaatactggttgatgacaacactggcttgaacaaagtgaccactctccaatggctactctccctctcagtgggccgcaggttgctagggctcaggctgtggctgttttccccgccgaaaaggggcggggtcagtcggtgtgttaggaaaaaaaatgtatatatatatatatgttgtctgcctccccacagagataacaacccgtggaaaaacatgccgttgagcgggaggaaggcgaaaagataggctgggttttttggggggtgggggagcgtggaggatagggtgggctttttcccctccaatgctgcgacgcattaaccctgctgctgttgggacgttctctgctcagcctattggctgagcccgggagccgctgtctgccaatcgggtggtgaaaggcagacaaatctaccccgccaccagcaaaaacggcgcgtaacccttgcggcgccggccgaaccgcgccagagctggcgcggggaaagggagataggtgtctccagctgctgtggctgtttggggcgggtcggcttcatccgcgtctcaggagcaagtagagaattagcgggcggcagcaatgctccgcaaggtgagaagctggacagaaatctggcggtgggctacccttttgttcctcttttaccacctgggttacgtttgtgggcagatccgctacccggtcccagaggagtcacaggaagggacttttgtagggaatgtcgctcaagatttcctgctggatacggacagtctgtcagctcgcaggctgcaggtcgctggagaggtgaaccaaagacacttccgtgtggatttggacagcggagccctgctcatcaagaacccaatcgaccgagaggcactgtgtgggctcagtgccagctgcatcgtgcccctggagtttgtcaccgaaggtcctttggaaatgtaccgagcagaggtagagatcgtagatgtgaatgatcacgccccccgttttccgcggcagcagctggacttggaaattggggaggcagctcctccaggacagcgtttcccgttggaaaaggctcaggatgcagatgtggggagcaattcgattagcagctataggctgagctccaatgaacactttgcactggatgtgaagaagcgcagcgacggcagcctggtcccagagctgctcctggagaagcctttggatcgagagaagcaatcggactaccgcctggtgctgactgctgtcgatggagggaacccgccgagatctggcaccgcagagctccgggtatccgtgctggacgtaaacgacaacgccccagccttccagcaatccagctacaggattagtgtgttggagagcgcaccagcgggcatggtgctcatccagctcaatgcctcagacccggacctgggtcccagtggtaacgtcaccttttatttcagtggtcatacccctgatcgtgtaagaaacctctttagcctgcaccccactactggaaagcttactcttttggggcccctagactttgagagtgagaattactatgaatttgatgtgcgggctcgcgatgggggttctccagccatggagcaacattgcagccttcgagtggatctgctggacgtaaatgacaatgccccttacatcacagtgacctcagagcttggaaccctccccgagagtgcagaacctggcactgtggtggcacttatcagtgtgcaggatccagactcagggtcaaacggagatgtgagcctccgcattcctgaccacttgccatttgccctcaagtctgccttcaggaaccagttctccctggtgactgctggacccttggatcgagaggccaaatctagctatgacatcatggtcactgcttctgatgctgggaaccctcctctcagtacccacagaactattttcctcaatatttcagatgtgaatgataatccaccctctttctttcagaggtcacatgaggtgtttgttcctgagaacaatcgcccaggggacctgctttgctcccttgcagcctctgacccagactctggcttgaatgcgcttatctcctactcactcctggagcccaggaatcgagatgtatcagcttcctctttcatctctctgaacccccagacaggagctgttcatgctactcgatcctttgactatgagcaaacccagacactgcagtttgaggtgcaggcccgggatcggggcaacccaccccttagcagcactgtaacagttcgtctatttgtgctggacctcaatgacaatgctccagctgtgctccgtcctcgggcccggcctggttccttatgtccccaagcactgcctccatcagttggtgctggccacctaatcacaaaggtgactgctgtggacttggattcaggttacaatgcttgggtttcctatcagctcctggaggccccagatcccagcctgtttgcagtctctcgatatgctggggaggtgcggacggctgttcctatcccagctgacctcccaccacagaagctggtcattgtggtaaaggatagtggtagtccaccactctctacctctgttactctcttagtgtccttagaggaagacactcatccagttgtcccagatcttcgagaatcttcagctccaagggaaggagaatctcgtctaaccctctacttggctgtgtccctagtggcaatttgctttgtctcctttggctcattcgtggcactactctctaagtgtcttcgtggggcagcctgtggagtcacatgctttcctgctggcacctgtgcctgtctcaccagatctcgaaggagggaggggcttcccccttccaatgggatcctccgaatccagctagggtcagatgaccctatcaagtttgttgatgtgggaggccactctcatggctgtacacccttggcttctgcacccactcggagtgatagcttcatgatggtgaagtcacccagtgcacctatggcaggggagcctgttcgcccaagctgcccaccctctgatcttctctatgggctagaggtgagacctttgcaggctcaacaaatgcttgagggttattctgatccaggcatatggctaggccatgtcctagagagtactggcctctcagtaagtgcccatagtgatgtcaccatttttgtaagaggtaactatgtggtagacgctgtgctttgtaactgtttcgtgaattaaccagagttgtcacagtttagcattgggggcgggtcatgcctatatctgagtaagaaatgaaagtaattggtgatcaagagccaggctgttgtggaagcatgatgatggaatgtgggagcacaggaggctacagtgcacagggtacagtgcaccaggcagtcacttggacaaaggtggctgttttctctactcttcctgaaagaggggatcagattctgaagtaccttaactctaggttaccatttcccaagggattgaggggaaataaaatctttgtctcccagtatctagtacactgtgaagggacctctctatttgaaacatagagacagcagaaagaggagagaactaaaggaatagagaggcacgcatcagagtggtggcatagatcttttggtctgggtcttaggactcatatcaagtccctactggggatttgaactagatgcggtaaattggaaggttggggcgggttggtcatcacctttggaaaaaacagtaagtgaaatcacttatgtcagaaaactggtttacagttggctgattcatagaaacagccaccctgtgcatctttaagttgagttctcctgaatttggtgaaaccatgaaacctagaagccaagccatccatgcttggcctctgaccaccctcctgggtgacctgattcagccccagaaatgttcccctacccaaaaactgtaacactcattccacatttggggtctggggtgtcagaaaagctaagtcccatgtcagctgacattgagatttccgcaaagcattgctggagagtcagggcaagactttacaaggttcttactaatcttttctctcaccttagcagcattcagcaggatgggggagggtgggggaatacatgggctttgcctctcccagaaggacaagattttgctggttcaagcaaagtggtggaagcttctgaagtcatgcaggaagttgctgggacagaacgctgaggagttttgtatcactttgtcttccctgttgagtaccatctgagctgtcaaactttgctgccaagggggctgaatcaacctgcagcacgaagtgagtggggaggtaggaagcttctgtgacacagatttgcagcctgtgttcccaaggtttccaggattgaggaaactccataattggttgagagcacacagactttttggccaatcagactcagagctgaggtgggagatctgctcttccagcccgcctctcctcctccagctccccagctccactcaaattcagctcccctcccccctgcccacccccgccactcggtgactaagaactgctgcaagcaggcaaacctccgagcagtttttaagaggctggaaggagacataagagacttcagctgctgcattccaagccctgggtctaccttggagacaggacagcacagacttactctccacaaagggacttctgggtcatggggcccaagacactcccacagctcgctgggaaatggcaagtgctgtgcatgttgtccttgtgctgctggggctgggtgtctgggcagcttcgttactcagtggtggaggagtctgagccggggacgctggtggggaatgttgctcaggatctgggcttaaagatgacagatctgttgagccggcggctgcaattgggctctgaggagaatgggcgctatttttccctgagcttgatgagtggtgccctggcagtgaatcaaaagattgaccgagaaagcctatgtggagccagcaccagctgcctgctgccagtgcaggtggtgactgaacaccccctggagctaatccgtgtagaggtagagatcctggatctcaatgacaactctcctagctttgccacccctgagcgagagatgcgcatctcagaatcagcagcatctggggcacgattcccactggacagtgcccaggatccggatgtgggcaccaatactgtgagcttttacactctaagccccaacagccacttctctctgaatgtgaagaccctaaaagatgggaagccattcccagagctggtgctagagcagcagctggatcgtgaagcccaggcaagacatcagctggtgcttactgctgtggatggggggaccccagcccgctcagggaccacccttatctctgtcatcgtgctggacatcaatgataatgctccaaccttccaatcctcagttctacgtgtgggaatcccagagaatgcacccattggtactctgctgctccgcctcaatgccactgatccagacgagggcaccaacggccaactagactattcttttggagaccacacatctgaggcagtgcggaacctctttggcctagaccctagcagtggggcaatccatgtgttgggtcccatagactttgaggagtcacgtttctatgaaattcatgcaagagcccgtgaccagggacagcctgccatggagggccactgtgtgattcaagtggatgtgggggatgtcaatgacaatgccccagaggtgctattggcctctttggccaaccctgtcctagagagcacaccagtgggcacagtagtggggttgtttaatgtgcgagaccgggactcaggtagaaatggtgaagtgagccttgatatctctccggacctgccatttcagattaagccttctgagaaccactactcgctgctaaccagccagcctttggaccgggaggccacatcccactatatcatcgagctgctggccagcgatgctggttcaccttccctacacaaacatctcaccatcaggctcaacatttcagatgtcaatgacaatgcaccccgcttcaaccagcagctttacactgcttacatcctagaaaaccggcctccgggctcccttctttgcactgtggctgcctcagatccagacactggggataatgcccgcctcacctactccattgtaggaaatcaggttcagggagccccagcctcctcctttgtgtatgtcaacccagaggatggacggatctttgcccagcgtacctttgactatgaattgctgcagatgctgcagattgtggtgggggttcgagactccggctctcccccattgcatgccaacacatctctgcatgtgtttgtcctagacgagaatgataatgccccagctgtgctgcacccacggccagactgggaacactcagccccccagcgtctccctcgctctgctcctcctggctccttggtcaccaaggtgacagccgtggatgctgatgcaggccacaatgcgtggctctcctactcactgttgccacagtccacagccccaggactgttcctcgtgtctacacacactggtgaggtgcgcacagcccgggccttactggaggatgactctgacacccagcaggtggtggtcctggtgagggacaatggtgacccttcactctcctccacagccacagtgctgctggttctggaggatgaggaccctgaggaaatgcccaaatccagtgacttcctcatacaccctcctgagcgttcagaccttaccctttacctcattgtggctctagcgaccgtcagtctcttatccctagtcaccttcacctttctgtcagcgaagtgccttcagggaaacgcagacggggacgggggtggagggcagtgctgcaggcgccaggactcaccctccccggacttctataagcagtccagccccaacctgcaggtgagctcggacggcacgctcaagtacatggaggtgacgctgcggcccacagactcgcagagccactgctacaggacgtgcttttcaccggcctcggacggcagtgacttcacttttctaagacccctcagcgttcagcagcccacagctctggcgctggagcctgacgccatccggtcccgctctaatacgctgcgggagcggagccaggtgaggggctcggcgccgccccgggcgacccctgggggcggcactggagaagccgcccgtcctcataagggattgaacttgcatccactcctctccggccggcttggtcgctggctgcgctccacccgattctcgggatcattggaccgtttgcgcgaaaccagagtggccgattaagggatggggctccgagcaccgggggtggtggcgactgtgggcgaggggaggtgggaccgacccccacccctacactcaaaaaaggccggggcctccttcgagcttccggtgaatttcgggcgatttccgcgggtgtcgggggtcccgggaggaggcagtcacagatccacccctgcagccagcctcctaggcgccggctccggcacgcttcgccggtctgtagatttcctcttcgatttctccccagctcccagcatctgtgacttcactgttaccctccctatccccgcatcacccaaccgcacctgtctgcgggacttaggtgtgcgcgcggggctcatgcgtgtcctccctgctggccacccccacggcccacacaagttgcacgggctcgccacgccccgccaacacgtgcgcggacgcacgcacgcactcctcgcacgtgggcttacgcgaataccagctttcactgccactcgctcgcggccagattcacaggcctgttccggtccactcgcagctcccctctgccgctccctccgccgggctcaggagtactcgtagctgattgtgcgcgcctgagggtcccagatcgcggccgcccaggaccaggcgaggactccggagcctcctctcacctctcccacctgcgccccgggctgggccgggtcgcctggggggcggcctgagcgaggcgcggggccaggagcgctggagcgactgccgctctaagtgccgggcgggcaggactctacgatccttgggccagaggtccggatggtcccgggactccgtctcaagggtcggcgacccctcaacccagaagcctcgagcaggcggacaggcagagctgcccagtggccgaggcgcggcagggctccgcgttgggcgagtgagtgagcctctataggacagcaggactgggactccagtggcaccagcggccccttcctcccgcaggaagtgaaagcctcgagcgccctggctctcaacccccagagatacaggcttttggcgccgtcgtgatcacaatgtgcccagcgatctagggtcagagatttggaggtgaccaaactatctgacactctaacaagtcctgtctcctctggcagatggaaagctataggctctgccagatgccagggtgcccttatgtgtgaggaaactacaatagtaaaaaacacaagtttctccaactccaggagcttttattcaaaatatatcaatgcctaactctgctcctaggactgtattttgaaacacccccaggtgattttgatagctgattgagagaaacttactatataactcctttgagaacctcatctcatttgctcttcccaccattgctgttggctaggtactaacatgcctctcttataacagcttcacagaggtcaagtgacttgctcaagttcacagagcaagtaagagagattctaacccctgtctaactccagaatgtgtgcttttaatttcttggcacttggaactttaaaagcttgaggacaggagaggggagttgcctctgctgggattttgcttctgctgggatggggcaagggtggggttccttcccttttaggaccttacatgtggggaaagtcttctgtggctcctcatttctgagcagtccccgcagcgcaaacttggccagttatccttttggagattgagttcccccagctccgtttcctcctatcacaatcactgcatttccatgtagattctgctgtgtctaagaatacagtggctgagggctggccatccctgtgcccttctccatggcagccccagaatggtgctggtgactcccgatacacctggaatgctaggtttctgggttctgctcatatcactgccacctgtgagccttgagtgagccactggcagttccggagcttccttctccctggagtaatctgagatactcacactctctgcttctgggagcaagtatgagtattaattaccagcccaccccagaaccagtgaggaggtggctctaggagtgctccatgagagtgtgtgatgggataacacaccccctggaaagaccagaagggactcaggaatgaagtggctggccagagccccacaccttcagctaggtgggagatggctacacatcagccccttgggagccctggagacttagttggccctgcttggaggctgtgggagctggatccctccccgctgcatcccttccatttttctccgtctcagacagagcagccttgttctcttctccttagtcacagaccattgtctggcacggagttctaggggtgagaagtgtcccgggacttggatgccccgcaaaggcccaatctggcatgactcctaaattaataatgtatttagctgtgggaagagattcttgcaagccaagggcccagagaagatgtccctgtgaatgtgtcactgcacaacctggcaccaaaagggttaccaagaacagcagccatcttgctgcagaggatgctttgttcccagctgaggagttgaataaattcattctagggctggtagaattctcattgaaaagcctcctttgccactttagggggctttgtctgcacctcttcccccagttccacagaagatgccttcagtccttgaattttggctcaggagttctgactctgggggcagggaggaaggggccatttctttaggaaaggagtctcagcttgctcactgtggtcagatgaaatgtgatttatctcttggtttctggtacctcagacctctgagacctgaggtgtattttgtctttggagatgagtccacccctgccccctcttagtccgttttcttctctgtgcccactcccctccttctctcccggcccatccctaggggctcgggtgacattctaacttctcacgggtactcagcccctttccctctgttttctccacagcaagccccgcccaacacggactggcgtttctctcaggcccagagacccggcaccagcgggtaggtgactgattctccagcccaccctcttctctgcggcattttctcagggatgacgtgggaggagatgggggagggcccagcatttgctacagatggcttctccctcagtttgagatcccagggaggtcttggtgtgcggggggctggcacacagaccccggaaggaagaggcgactgccctgactgttcaggaagctcaattcacatgcttgccccttccctcctcgccacgaccggcaccttttcctatcccctgagggcactgtggaaccaaaggatggtcttaagctggtctctgggtgaaagcgaggctttctatgcccatgtactgcctaaccccctcccctgagttgagctgggctccattatgacctggggctcaggcagaaaagcatttgaccggaggaggcggtccgcactcagcgcctcctccagagcctccagagccgaggctgactgcagcctggggagagtggaggcagcacagctggaggtggaactgaggaaggactgggcggggcatggagcaggcccccttctccggcccctcctcccactgtcctctgcccctacttgtcctgctctctgtctgtggggtctccgtgtctctgcccctttttcttgagtttccgtctttgccactttctcttacctctcagtccttccctcagtctctatctcgctttgcaatctctgcctctccctctcttctccatctctgtcttagcttccgtcttgattgctgcacctcagcctcagtccctttcatttgtctacttgcattgatctgtgccgcccactgtgcctgccatggcataagtgctcaataaatgtggagtgagtaactacacgggacccttagtctctttctccttctctatctctgcctccctgtccttgtcctggacctcttttctgtttctcctttcaccgtttcctagcgccttgtgttcttctatccccagcctctatgtttctctgtctctcactatttctgctttcctctctgttctttgtctctctttgtctctgtctctgtatatctttctttgtctctgtctctggtctctgtgcctgttgtctttttctgcctctttctctgttactctttctttatctctctttttcttttatcttgtcttttttctctgagcctctgtctctgtctctcatttttttgtgcttgtgggcaagccagcacacacaaccccccacccaccacccaccaacaccccgctctcttccttccctgcccctcacacactgagcctttgatcgcagctctccaccagacaccctcccatccaagcagccccagctgctcatttcaatctggtatgaattcctgctgagacaggaaccccctgcgggctgaaggggagggaaacttcagcagaaagaccttcagttggtctgagcagagtgggataggctctgcgccaggcctcccagttagaagtcaggagcctggaggagtctcagagcccagggagagaagcaggagcttgggccaccttaccctacctcctcaatggttgagtacttgctgtccacatttgccaagttgctacagatgctgagcttccaagagttatctttcccccatcctgcaaccaaccaaacccttgttgccacaaggacccaggagcccttggtgtatggcagagattccagcttctgggcatgcacagtcctgtcacccattttaggaacgcaaagcgcttcttagaaggcccctaaaaagcagcagatcaaaaggcttgggctgcccttgcccttcctttgaccccagctgttgtccttctccctgctggccttgccaaccttctcataagttatccattaagtcattaatgtattcattcgttcatttattcaacaaatatttatcgagcatctactatgagcagggccctgtgctaaacattgggctataggagtgaacaagtagatgtgatcccagaactcataggcttccagaccagcagaggagactgaaaatttgcaacaagtaacacttaaaaaaaaaaaaaaaggctgggcactgtggttcacgcctgtaatcccagcactttgggaggccaaggtgggtagatcacttgaggtcaggggtttgagaccagcctggcagccaacatggtgaaaccccatctcgattaaaaatacaaaaattagccaggcgtggtggcaggcacctgtaatcccagcgacttaggaggctgaggcagaactgcttgaacccggaaggcagaggttgcagtgagctgagatcacgaaaaaaaaataatctagccacaaatcacagtaagttctgagaggcagagaacaatgtgagtgtaatgggggggggaagatcagagaaggcttctaggaggaggtgacattgagaagttctaggccatttatgttccctctacctaccaccaccccaggccatacactggctttgaagcagaattcaccattgaacctggaagccccaccaactgcctctcatgtgtcctctggggtgagcaccttacccctgcctcaactcccattccatcaaatgagaggcttagtggcctggaatacatgtgggagctcttggagatatggaggagaaggtgcggaacctctctctctctcctctctctgcttccttagttaacttgtggaggatgcaacaaaccttttttttttttttttttagacagagtcttgctctgttgcccaagctggagtgcagtggtgcgatcttggctcactgcaacctctgcctgccaggttcaagcgattctcctgcctcagcctcccgagtagctgggacagcaggtgtgcaccaccacacccagctcatttttgtatttttagtagagatgggtttcgccacgttggccaggctggtttcaaactccccgacctcaactgatccacctgcttcagcttcccaaagtgctagaattacaggtgtgatcgcccccggccacaacaaacatttttgattcagcggctccaaagtgaaataagcgttaggatctagtccagtaacttcaacttctctccttcattcattcaacaaatggtcagtgagcactttctgttggccaggcagtgttctcgatgtgggaggcccctgccctcaaggagtttacagtgcactgaaggagacaaatattgaccaaataattacaaaaataaatgtgagactgaaactgtcataagtgctaggtagaattgtatctggtggtgtgggcgtataatagggatttgatttagggagcaggaggacatcctggaaatgaagttgtgctgagatctgaaagacaaatacaaattaaccagctaaagaaaagaaggaagagcattccagatggtcaggcataccagcttcaaagcagggctggtgttgagttcttcagtaaacttggttcaagatcaagccagctctgggtcacactgcctacacagaaggaagagcattccaaatgggaaaagcctatgcaaaagccttgtggtgaggcctcctgggatcaagggaatggcagggagttttctctttgctggcactggagtgaggggatgaagaggagaggttccttttatccagtctaaccctggttccagccttctgttgatgccctgcctcactccctccccaccatcttgcccactgccctccagcctggtctggtcagacacaccagcttcaaagcagggctagtattgagttcttcagtaaacttggttcaagttcaagtcagcactgggtcacactgcctagacagaaggaagaagacctggccaggtgtggtggctcacgcctgtaatcccagcactttgggaggctgaggtgggtggatcacctgaggtcaggagtttgagaccagcctggccaacatgatgaaaccccatctctagtaaaaatacaaaatattagccaggtgtggtggtgcacacctgtagtcccagctactcaggaggctgaggcaggggaatcgcttgaacccaggaggcggaggttgcagtgagctgagatcacaccactgcactccagtctgggtgacagagcgagactccatcaggaaagaaagaaagaaaaagagagagagggagggagggagggaaggaaggaaggaaggaaggaaggaaggaaggaaggaaggaaggaaggaaggaagaaaagaaagaaaaagggagaaaaaatgaagaagacttacattctgaagttcctgcttggcacatgcttctcctccccaccactatcccttctcaggtcatcctttgggtgtctgatcccaatagctgttgtctcaagctctgagcccagcaaaccatttcccccttcttaggctgtaacccaggccctgccctgcagctgtccccagcctctgcacaaagagtctccatttggtccctagactgttctctgatggctccacactaccatccctcctctgagagacagtatccctgctctctctcagtttgggcagtcattcaacaaacaaatagcaacttaatttttttccacttataaaatagtacatgctcattatagaaacatgaaaaatagaaaaaaaattaaaaggaaaaccacccatcattttacaatctagggagaaccaccaccaactacagtttaatatgaaacatttcaaatatgtacaaaagtagagagaatggtgtcatgaacctgtatgataccactatccagcttcaactaatgccttatcttgtttcacctatatccctacccttatcctgtccttggattcttttgaagcaaatctcagacatcatataatttcatcttggtctccaccatctttaacagatgacttttttttttttttttttttttggagacagagtctcactctcttgcccaggctgtggcacaatctcagctcactgcagccttcgcctcccgggttcaagcaattctcatgcttcagcctcctaagtagctaggattacaggtgtgcaccaccacacacagctaatattttgtattttcagtacaaacagggtttcgccatgttggccaggctggtcttgaactcctggcctcaagtgatccaccctcctcggcctcccaaaatgttgggattacaggtgtgagccaccttgcccggccagatgattctttcataaggtccacattttatatttgagtgagtgtctcttaagtatcttaatgctcttttaatgtaaaagacttcccctccatcttccatttttgcaatttatttgttgaatccctgccttttcatatatatctttctaaacttttctttgtgtaatcaaagaacatgcatgagcttcatttttatttttatttatttatttatttatttatttatttatttatttattgatacgtagccttgctctgtcacccaggctggactgcagtggcgcaatctcggctcactgcaagctccgcctcccaggttcacgccatgctcctgcctcagcctccagaatagctgggactacaggcgcccactaccacgcccggctaattattttgtatttttagtagagacggggtttcaccgtgttagccaggatggtctcgatctcctgacctcgtgatccgcccgcctcggcctcccaaagtgctgggattacaggcgtgagccaccgcgcctggccgagcttcattttaaaaaaatctcattcacctaaataagttgttcacaaacttgtcacactttcatgtgacactttattcacatattaagaactgttattcccagtcatacggtacatttcctactagttttttaaaaatagcaactgaggccatactgtccaacagaattatagcttttttcttctttgcagtgtatcatgagaatttccccatgtctttcaaaattcttcccaagtcatttgcagagtaactcctcttatgaatatacatattattttacagaataagtcctcatatgaatatacatattatttttctaatgctaatgggcttttgctacattagaaaacatacacattcatttacaattttttttttttgagacagtctcgctctgtctccaggctggggtgcagtggcgccatctcggctcactgcaagctccacctcctgggttcaagcaattctcctgcctcagcctcctgagtagctgggactacaggcacgcgccaccacgcccagctaatttttgtatttttagtagagacggggtttcaccatgttgaccaggatggtctcaatctcttgacctcgtgatccgcctgcctcagcctccctaagtgctgggattacaggtgggagccaccatccccagcctcatttacattttaacacaattaaattcagggtgttgtcagggtgacttcctagatttctcagttttttgagcatgatgtagggagtattttattatagtccagtctatgggatattcccttatacacacacacacacacacacacacacacacacacacacacacaccccaaactcaatagggcaagaaccatattcatcatctcttaaatcctaggtcctgtcacaggccactgcttggaaaatagttgactaaatgtagtccatttcttccatttttacttttcactattccccaaatcctggaagagtccctcatatctgctgctggggctccaaggcctccaagctgaagcccagtacgttgttgtgcataagatcataggccctggaatcatattaggctggctttcaggttgcaactctaccagttccagctgtgtgactctggtatagtctctcaacctctctgagccctgttttcatctgttggaaaatatagataatcacaacacttatctgcagggtgattccgaggataaaaaagacaaatatattacccagtcagcttagaataggaagctctcagtaaatggttaaaaaagaggtctctctccctctgctcatctcttacccagcttcacataattggcagcccacccacctgtttggccctcaaccttcaaccatttcccaggacgcctccttacactcctgatcatcatggttccaaccccactgttccactcagctttgttccctcaacaccactgctccctgtgacaggtcatcctcctaacctctggcatctggtcccgttgtctccctgacaacccgcatgctctcctccctgcaacccccgccgcttgcctgctctccctactttattcccattagcccccttcacctggggctgagaacacctggccttgaccctgcaccctcagccaggcccacagagctcagtcgggccggaagtaaggaccccagatattcagttgaggaatttaacattaatacaataatatagaatccaccagcagattttcataaatgttctgtgtgttcttttatccttttttttaatccaggattttatcaaggagcatagattgcatttggttgtcacgtctttcctctcctttaatctggagccagctcccagtctttttatttttttaatgacatggatatttttaaagagtccaggccagttgtactttaaaatgtccccgaacctggatttgctggctattctctgatggttagattcagattacacaccttggtaggaatacttcccgcagcatcacactgggactcatctaacgtcggcctgtcccactatcagtgatgccgagtttgttcgtgtggtaaaaacagtgtcccagatctctccattataaaaatatatttttataaagatattttaaaatatttgtgaaaatataagtaatctgtggatgatactttgagataggcagcaacccttcatgcaattttagtattccctgatgatccttgcctgtatctgtttttacatcagtgattacaaagcggtgatgttctgtcattccttctacatgtatttgctggtattcttctgaaaattacctggatgatttcttcagatttaaattcactgtcttttccttggggaagcctggactggctgagctgcctaaccctgactctctgtcttttttttttttttgacagggagtctagctctgttgccaggctggagtgcagtggcaaccttcacctcctgggttcaagcgattctcctgcctcagcctcccaagtagctgggattacaggcgtgtgccaccatgcccggttaattttttttttttaatatctattttagttgagacagggtttcaccatgttggtcagaatggtctcgatctcctgacctcgtggtctgcccgcccctgcctctcttcataccctctggtagcccctgacacagcccatggcaagtatcacaattgcaattactctattgtgtaattatttaaaatcagcctctcagtgcccaccatgagcaccgtaaagatggacagtttctatcatactcacagccacaaccccagcacctggctctgtgtctggtacatagaaattgctcaagaaagaattgttggaggggcgcggtggctcacgcctgtaattccagcactttgggaagcggaggcaggtggatcatgaggtcaggagttcgaaaccaacctggccaatatggtgaaaccccatctctactaaaaatacaaaaattcgctgggcatggtggcatgtgtgcacttgtcgtcccagctgctcaagaggctgaggcaggagaatcacttgaacctgggaggcagaggttgcagtgagccgagatcgcgccactgtactccagcctgggtgacagagcgagactccagctcaaaaaaaaaaaaaaaagaaaaaagaaaagaaataattattgaatcaatggaaacagaattacaactcttcccacttttgggaaggagaattgagattcctgctttccccttcaaccctagctttatgtttgttgtgatggtatagaggtcacacatggcagccttgtgtctgttcttaggctgagttcatctacttagggacggggaatcccagattgggcaaaaccaaaagcagggacagaccttggaaaaattgtaaagcagttcttggttgtgctcacccaccatgacaaaatatgcacacacacaacgcaacacacacacagacattttcatgccttcaaggcctaccctacagcctttcccatggtgccaaacccttcttcttaccttacagtcacttaactgtctctgctggtctcttcccactcatttaggcaacaaatatttattgaaaaacttctctgagccagatggtgccaaacagttacctaaagggcagactgtgtgtgtgccagggctgtttcccgccaacactcccctgcaaattgaaataatttcatccttggaaattcaaaaaaatcatgaaaattgtcactgtgggaaaattccaagtagagctgaaccttctaagaagcagagagttcttcttatggtttagtatttttttaaattatgaatcatttcatgttttttcaacactcggagtttctaaaagtctcacttaggtccaagtgctaggctttgtgctaggtgcttcagtaggaagcaggtggagtcgctgcctcacagaagccagtgtggtggaggaacagacaggcactacaacagctgcagtgtgactagtgccatgtggggcagccgctgggatgggagtacagtggaggcacctgcccagtctgagtggatctcctctgatatattttattcgtgtcatcatggcaaatgttgggggactggcattctagggaacaccatctgcccaggattcacagcaagagggaacttgagggataggaaagtgcaccttggaaaaggtttgatgatagagtgtttgagggcggggggtgggggttcttgtaaaataggaggggcaggttcttctatggccgtggattttactctgagggcttaggaagccattgaattttagaaatttcttctccctgctccagggtctcttggggcctcctacatctccccctaggtacctcctaggtccccactttttctctagctctggaacattctcttccatttcccaccttcacagtcctctggagaaggtctgatctccctcactatgacaggaagccaggctctctcatggtgggtgggggaatgcactatgttcaatgcattggaccagcctggccaacatggtgaaaccccgtctgtactaaaaatacaaaaattagcctggcacagtggcaggtgcctgtcatcccagctacttgggagactgaggcaggagaatcgcttgaacccaggaggtggatgttgcaatgagccaagatcgcgccactgcactccagcctggatgacagagtaagaccctgtctaaaacaaaaagaaaaaagcatcggaggcagcaaagagctggtttgagggactgacttgtgggattctggcttctgaaggattgtagaagtgcctcctaccttgctgagagaaacaggtcttgggcatggggtagggttagggtactaggtttgggagccctgggagaggacaggaggggcatgagctgtgccggcctgggagtctgtgctcaccatcctactctctccccagctcccaaaatggcgatgacaccggcacctggcccaacaaccagtttgacacagagatgctgcaagccatgatcttggcgtccgccagtggtaagtggtgtcagtgtgtgtatggaagagtgggagacctggggttctggggtgcatctcacagccaccatgcccacggactggatgtcaaacctgtgtagtttctccagatctttcggcaggtctgaaaggacccacaattccaaacataaagcctggaattgtggctaaggaacagcagaggggttgggggtcctgggatgcctggaggagagcgaacaaggaaaagactcatggagggaatagtggttacaagtctagctctggaatgggacagtgtagctcaggtcctagctctgctactatccttgggacttggatcgacttgctcaatctctctaaacctcagtttcctcagcctagaaagtggggacagggaccccaaagggttgttgtagagattaaatgagatgataccacaaagcatagagttctgggcctggcgcttggaagccctcaagcaatgaaagtgggtgtagaaatccccagccgagagaacacctcctctttatgcgaggctcctcttttgctgcccctaactccagagtaggattctggttttcccataaggttgactaagggcttcctttgtaatagagattcggctagtggtggttgtccctgaagagtcactagggcccagagcaggagaagaagaatatcatttgtccttaagagcacagcctaagctgggcgtggtggctcacgcctgtaatcccagcactttgggaagctgaggcaggaggatcatgaggtcaggagttcgaaaccggcctggccaacatagtgaaaccctgtctctactaaaaatacaaaaattagctgggcatggtggtgcgtgcctgtagtcccagctacttgggaggctgaggcaggagaatcgcttgaacctgggaggtggctgtggtgagcagaaaatcgcaccactgcactccagcctgggcaacagtctcgctctgtctcaaaaaaaaaaaaaaaaaaaaagagcacaggctttagaggcaggccaatctggattcaaatcctggcacctggcaccaccacttagcaatgagtccttaggtaagttattaaaccccctcggtttcacttactattaatgggcacagtattaacggatctcattgtggtgttaccagggccaaatgcaagtccctcagcacaggattggcagagagtaagggcacaatatattattatctttgctgacccaaacccgttttttactgggtagaaagcagaattagaataatgcctattaataaagactagcttctggagcagcaaatcctgggcttataaggaggctggcagaggatcaaggcattgccctatatcatgaactgatagccctgccctccagcatgtctggaggactggtgggtagagaaccaggtgaaatcacaagaagcactgtcatcacacctgggcacatactaaacaaactttaggggcctcctgtcaatgaatcctctcaatagctctgcaaggcaggtctgatttctcacactcgacagatgagagaaccgagaaggcacttgccccagggtcctcagttttgagctgccaagctgaggttctaacctggctcaactcctaagtttatgctctttctactatagggaccatggctgcctttggatccagcctcggcttctctattacctgagcaggatgagaggctgtcctcttcctcgagctctgctttattcttccagatcagggttgccagataaaatacaggatgcccagttacagttgaatgtcagataaacagcaagtactatttcagcataagtcagtctcaaatgttgcatgagacataatgtactaaaaaaaaaaatgctcattgtttacctgaaattcaaatttaactgggagccctgtacttttatttactaaatctggcaactctaccccagatgtctgtgaggttaagtggggccaggcctacagctgacggaaggacagagagagaggtggcagggactgctggcctcctgaggcagagctgtcccaggtctggtggggctatgattccagagaggccagagactgagtatgaaagtggcaggcggctgggtctgaggagatgccaagttggcctcttgagggaaataaacaggtatatttagctgttgtggccttgcgccctgaggccaggaagcagctttttagcctaaatccagatgttaaaaacagaaatgaaatcagtatttatggccccaaaccctccaagcaagtcatgcagctcgttcccctgtcaaggcctcccacctttggcccacacagggcctgaccctcgtctaagcctgcgccctggggaacggaccctgggggtggaggtggtgggtcaggccctgctctcactttcacacccgcttcctagccctgaaaccagagaggttcctgaagtccagcccagccaggcctgtggggctgctgagaggggttaagtaagagggagagtaaaaaccgacacttgggaggaggcttttaaaataaacatctgcggggagggatgctctcaaggaggctgcggtttgcagctcagccagctgtgttccagctaatcagcctccttgggctactctggagttgctgccttggccctgggatggggtaggttaagaggacagagggaggtcagggagctgggggctgagtttccctgagtagaggctggcacaggagagaaggcatcacccccacctcgtccaggccagaagatgtccagcttcttgaggctctcctaagtctgcctctcctgggaccaagagaaaatcccggtccttgaccaaggtgggccttggggggagtggggtgtagagggaggggcactggagaactgactctacagaaagtcaaagctggcaatccaacttcttcccctcagatttatagatgggaaaacaggcttgagccacgcagagacttgaccaagctcacacagttccttagtggcagagcagagcaaatattctctttcttttacattctggatttccatatcttctctccctcctggtccagcccaacctcagggcaccccccacgaggtgggcgggggatggctttgtcacttgcacccactcggggtgctactcagagatcttgggtgcacataggacgtgggtgggccgagcttctagctactccgtcaggcccttcctgtcattctgtctctgcctcccttctccctgcttctccgtgttcctcctcattcttttctgtgtgcagggagactacaccccccaccccgctctttctctggcgcctctgaggtcccccctctagcccctaaatcactctggaatcctggctctttgaagccagatctgggcccccctcccctaccccttccattcccaggctgggaaaggctgaagaggctgacggctggaggggagggggcggggcggtggcggatctggcttccttttggagttaattagggaaaacagagaaatgtcagcggaatgaaagggctgggggtgggggccagctggggtaggagaggaggaagtgggcagctgctccctcccactcaacccctctcccccgcccccagaaagctctcagctccggggatttgcgacatgaaatgggggctgtagaaacctgagcgctggtgcgtgaagagaaaaaccgaggcgcatcccggctctcccctcccgtgtgccctcctcctcttatgccggcttgaaaatatttcctgtctctctatttctcaatccctggttgatgtcccaggattactcagcctctccggctttagtcactctcgctacccgctcccagggtccagggtggaggcagagggaggctgggagagaagctctactgccagctgggcctgggctggcctgggcatccctgaggttttaactgtctcctaaccacagaggatctcagggcctccagcagcgagccccaatgagtcaaactcttgtttcctcctctcccacccccgacccagtcagggcaggtgaggggtagaggtgatggcatgctggatgtgacggtgttgatgatgtattgcacaggatgaagcaccatctcatttagtcctcacagcagccttcacagtgcgtacaaatcagctggcaattccgagaggctgcattctaaacaagttcctgggtgatgctgagccagggccagagtgtggacttctctgggccccagtttcttcttctgtacagtgggacgttggactggaggtgctgtctgatgtcacctagctgtggcactctgagcctgtgcctaaagtgtccctgagatgtctagtccccgagatcatcatctcctcagcttcatagagccgagctcttctccatcttctctctacctcccattcactcagaacagggataaggtccaagctgctggtggtgatggtgactgactgtcccttccagcatgcgcttaggtacacttgggcctgaatgcccctctaacaaatgctaccgggtatggccttggtccttctaacacttggttccctcatctgtaaaatgagggtcataccacatagctggctgggctgttatgtagaggttaaaagtgattgtgcatgtgaagcatccagcagagtgcctggcacacagtaggtgctcaaatgctgttttgaaatacaaaaattagctgggctagtggtgtgcacctgtaatctcagctactcaggaggttgaggcaggagaatcacttgagcccaggaggcagaggttgcagtgagccgggatcgcgccactgcactccaggctgggcgacagagcaggactccatcttaaaaaaaaaaaaaaaaaaatgctgttttgaaatggaggcttggaagagcactcttcacccccaccccacacacttactaacggaactaccgaatctctactcgtgccaggccttgcttggcaaaggctaggggcatgtaaagccatggtttcatggctgctgccctccaggagcccatggtctagtgtgggagtcagaggctcccttgagaaagccagggcaaggaactgagagcccgtgtcacagccctgagagaaataccagcgaatgtgttttgagcacttacatctaccaggcactattttacgtacctgacatacattttcttatttagcattcactaaaaccagaagaggtggttaccattatcatccccattttgcagatgagaaaactgaagtggcataaggaggttaggtagacttgcccaggatcacagtgagtaaggaaaggagctaggaatcaaacctagactttctcactccagagcctcttaacctctaccctcaactcttgtgaagagagactaccttggtgacccctatattcccagtgctcagcgtggtcaaggcccagggtgctgtataggcattcattaactgctggggatataagacagtgactgttgaggaccctaagtttagctcccacctgatcttcctctgtctctgcagaagctgctgatgggagctccaccctgggagggggtgccggcaccatgggattgagcgcccgctacggaccccagttcaccctgcagcacgtgcccgactaccgccagaatgtctacatcccaggcagcaatgccacactgaccaacgcagctggcaagcgggatggcaaggccccagcaggtggcaatggcaacaagaagaagtcgggcaagaaggagaagaagtaacatggaggccaggccaagagccacagggcggcctctccccaaccagcccagcttctccttacctgcacccaggcctcagagtttcagggctaacccccagaatactggtaggggccaaggccatgctccccttgggaaacagaaacaagtgcccagtcagcacctaccccttcccccccagggggttgaatatgcaaaagcagttccgctgggaacccccatccaatcaactgctgtacccatgggggtagtggggttactgtagacaccaagaaccatttgccacaccccgtttagttacagctgaactcctccatcttccaaatcaatcaggcccatccatcccatgcctccctcctccccaccccactccaacagttcctctttcccgagtaaggtggttggggtgttgaagtaccaagtaacctacaagcctcctagttctgaaaagttggaagggcatcatgacctcttggcctctcctttgattctcaatcttcccccaaagcatggtttggtgccagccccttcacctccttccagagcccaagatcaatgctcaagttttggaggacatgatcaccatccccatggtactgatgcttgctggatttagggagggcattttgctaccaagcctcttcccaacgccctggggaccagtcttctgttttgtttttcattgtttgacgtttccactgcatgccttgacttcccccacctcctcctcaaacaagagactccactgcatgttccaagacagtatggggtggtaagataaggaagggaagtgtgtggatgtggatggtgggggcatggacaaagcttgacacatcaagttatcaaggccttggaggaggctctgtatgtcctcaggggactgacaacatcctccagattccagccataaaccaataactaggctggacccttcccactacataatagggctcagcccaggcagccagctttgggctgagctaacaggaccaatggattaaactggcatttcagtccaaggaagctcgaagcaggtttaggaccaggtccccttgagaggtcagaggggcctctgtgggtgctgggtactccagaggtgccactggtggaagggtcagcggagccccagcaggaagggtgggccagccaggccattcttagtccctgggttggggaggcagggagctagggcagggaccaaatgaacagaaagtctcagcccaggatggggcttcttcaacagggcccctgccctcctgaagcctcagtccttcaccttgccaggtgccgtttctcttccgtgaaggccactgcccaggtccccagtgcgccccctagtggccatagcctggttaaagttccccagtgcctccttgtgcatagaccttcttctcccacccccttctgcccctgggtccccggccatccagcggggctgccagagaaccccagacctgcccttacagtagtgtagcgccccctccctctttcggctggtgtagaatagccagtagtgtagtgcggtgtgcttttacgtgatggcgggtgggcagcgggcggcgggctccgcgcagccgtctgtccttgatctgcccgcggcggcccgtgttgtgttttgtgctgtgtccacgcgctaaggcgaccccctcccccgtactgacttctcctataagcgcttctcttcgcatagtcacgtagctcccaccccaccctcttcctgtgtctcacgcaagttttatactctaatatttatatggctttttttcttcgacaaaaaaataataaaacgtttcttctgaaaagctgaacgtttctgtataagcgatggaagctcctggcatgtgtgcatgaagtgatgagctgaggtgggtgctggaagaagggcggaatcgggaggccactttgtgtcattgcgcgtctagatgtttccgaattgcgtgtgtgtgtgtgactgtgcaatatggttgtgtatgcttgcaatgccgttgtgcctatgagacagtgtgcgattgtgtgcctatggatctgtgtaccgtgtgccattgtgtgatcggtccgctgtgggggtggggatctgagtgcggcgtgtcagtgtgcagtggagtgtgcagtctaagcttgcggctgtctccaggcagaagaggagaccccggcgcgggcgggggcgggttggcgccgggcaaacgccttgggtagaggggagaggacgtttcgttagttcccgccccttcctgactaaaattgcctacccgaagcgccccggagggcttcacgggaggagggtagactctcctttgcccccgcacccccacccccgctgcctaggggttttgggaaagccgcgggagtgggagggaatgcgggaggtgattcttccaaagccaagtctgcagctcgagcctcagtttccccatctggaattcgccttcccgctgacatctccgtagcgaagcctaagaaattggagggctcatcctcttcttgcgggggtcaaggggactgaaaggacgtgcaggaaatgagatccatcgcagactcagctcccctccctccttcctgtcggtgcttttccactcactcgcctgctctcccatctccccgccccctccgcctgcctcctcgaagcactgtgggattccgaggttgctgcagccagagaagctgcagaaaaacacggagctgggggtgaagggggacttaaaaggggaactacccggaaggacccaagaacacaaagacagagccactgcggttatctggctggtcagcaagggtatgcggcttcctccgcgctgcggaggctcccagagccaggtcacccattctgccagctcaagtctgttgtcatgggaaccaaaccttccaacttaagaatctgggggcgactttctagcgtgggaggaagggtggtgtgcacggttgctgagatggaagcagggttttgttactcagagccaggctgcggaggggcggggtgccgggcgcctgggttctattccaggcacagcagcagactggcagagcgcgtgagcagctgtggtttgtcccctaattggtatgtgtgcctataaagctctgaaccagaaaggcgtggcctccggggggacgggagggaggcggcaggcaacccatccccacacctcaggccatactgaggaggcagctgcccaggctccagggctatttaaaaggcttttatttccagttccagagcccgcccgaatgggtttgtggtcctctccaggcctctccctgtctatcctgggcctgctcattgctggtctggcttttttgtgcaggtcataacg

SEQ ID NO: 458 - DNA, 39979 bp, Homo sapiens
  source 1..39979: mol_type = genomic DNA
tcagccctcttgctggtctggctaattatcaaacttgagcatttaaaactgggggttttcagagattaattgaagtgttaaagacatggaaatataggtcacatatggcttttcatctcttccggaaatatcctatatatccttacttcttttctacctacctaacctatgtgcctaccccttcacttatgttcaaggttctattatacttcaaaaggactctatgcaatcaaagtgatgtccaagacaaatatacagaaatagtatgaggctctaacactttacatctaatggagtggtttgcatcattaattgaggcttactctgtgccaggcactttacctgccttcttcatttaataggataggagcaggaactcttagaggttcatttcttgttcaaggatatacatctcatctctggcttatatcacagtggactcttttattcactatcctaatcattataattttgtttggtgacaacaattctaaatgcagaaaagttaaggctctttattctgtgactaaaggctttgtattttctaaagatttgtggagctttgctgccattatttcaataattttataaagatcctaggtggtaaataggcctggctttttttctttttgaaatcttctccgtcttcttcttcattagcagtgcaacttcttgtggcatatggtacccaagatcttgggaaaaggattgatcaagtaaagggaaacgatagagagagtgtgctctacaactgagatcatgctccttgtgaaagacagggtagggaaatttcttattgctccctggttcttaagaaatgagagctaacaatgacatccagttttaaaagaaataaaatctgaattgtacttttaaattttataagccagagttaaaccaatagattgtaactcctgctaatttgatagtagctccagataatgaggaagtgacagggaatgctaatttcatttggtaagagataaaactgaaattattaatgtctccacggaaatgctaaatgcctccttacaagtagggtccggctaattgtctgtcttccaacaagccagatttgttggtgtttttccagacaatgttgtgtagttttcggtttggttcgatcccctttcttgtgatcaaagaaagtgattcaaatgtttaatgagtcttgatttggattggagacttgcagaacggctagcctcacagccccaaggctggctttccctaaggtaggtttcctatgcaccgatactggcaaggcgctttggctggaaactctggaaggaagccaaaggaaagtgaagttcctggcgctagcgcgtgtcctgctcagagagcccggcgctagctcattcttcgtgcagttattggctgggactctgtgtgccgctgtcggccaatgaagacgctggagatcgggcccctgcccgtcccctttctgcgccccgggatgaggcagagactgaacagccggcgagcaaatcaacggcatccagaaagccatgtcggactcggcgcccagcgcccaagcgctaacccgctgaaagtttctcagcgaaatctcagggacgatctggaccccgctgagaggaactgcttttgagtgagatggtcccagaggcctggaggagcggactggtaagcaccgggagggtagtgggagttttgcttctgcttggtgccttgaacaaggcttccacggtcattcactatgagatcccggaggaaagagagaagggtttcgctgtgggcaacgtggtcgcgaaccttggtttggatctcggtagcctctcagcccgcaggttccgggtggtgtctggagctagccgaagattctttgaggtgaaccgggagaccggagagatgtttgtgaacgaccgtctggatcgagaggagctgtgtgggacactgccctcttgcactgtaactctggagttggtagtggagaacccgctggagctgttcagcgtggaagtggtgatccaggacatcaacgacaacaatcctgctttccctacccaggaaatgaaattggagattagcgaggccgtggctccggggacgcgctttccgctcgagagcgcgcacgatcccgatgtgggaagcaactctttacaaacctatgagctgagccgaaatgaatactttgcgcttcgcgtgcagacgcgggaggacagcaccaagtacgcggagctggtgttggagcgcgccctggaccgagaacgggagcctagtctccagttagtgctgacggcgttggacggagggaccccagctctctccgccagcctgcctattcacatcaaggtgctggacgcgaatgacaatgcgcctgtcttcaaccagtccttgtaccgggcgcgcgtcctggaggatgcaccctccggcacgcgcgtggtacaagtccttgcaacggatctggatgaaggccccaacggtgaaattatttactccttcggcagccacaaccgcgccggcgtgcggcaactattcgccttagaccttgtaaccgggatgctgacaatcaagggtcggctggacttcgaggacaccaaactccatgagatttacatccaggccaaagacaagggcgccaatcccgaaggagcacattgcaaagtgttggtggaggttgtggatgtgaatgacaacgccccggagatcacagtcacctccgtgtacagcccagtacccgaggatgcccctctggggactgtcatcgctttgctcagtgtgactgacctggatgctggcgagaacgggctggtgacctgcgaagttccaccgggtctccctttcagccttacttcttccctcaagaattacttcactttgaaaaccagtgcagacctggatcgggagactgtgccagaatacaacctcagcatcaccgcccgagacgccggaaccccttccctctcagcccttacaatagtgcgtgttcaagtgtccgacatcaatgacaaccctccacaatcttctcaatcttcctacgacgtttacattgaagaaaacaacctccccggggctccaatactaaacctaagtgtctgggaccccgacgccccgcagaatgctcggctttctttctttctcttggagcaaggagctgaaaccgggctagtgggtcgctatttcacaataaatcgtgacaatggcatagtgtcatccttagtgcccctagactatgaggatcggcgggaatttgaattaacagctcatatcagcgatgggggcaccccggtcctagccaccaacatcagcgtgaacatatttgtcactgatcgcaatgacaatgccccccaggtcctatatcctcggccaggtgggagctcggtggagatgctgcctcgaggtacctcagctggccacctagtgtcacgggtggtaggctgggacgcggatgcagggcacaatgcctggctctcctacagtctcttgggatcccctaaccagagcctttttgccatagggctgcacactggtcaaatcagtactgcccgtccagtccaagacacagattcacccaggcagactctcacggtcttgatcaaagacaatggggagccttcgctctccaccactgctaccctcactgtgtcagtaaccgaggactctcctgaagcccgagccgagttcccctctggctctgccccccgggagcagaaaaaaaatctcaccttttatctacttctttctctaatcctggtttctgtggggtttgtggtcacagtgttcggagtaatcatattcaaagtttacaagtggaagcagtctagagacctataccgagccccggtgagctcactgtaccgaacaccagggccctccttgcacgcggacgccgtgcggggaggcctgatgtcgccgcacctttaccatcaggtgtatctcaccacggactcccgccgcagcgacccgctgctgaagaaacctggtgcagccagtccactggccagccgccagaacacgctgcggagctgtgatccggtgttctataggcaggtgttgggtgcagagagcgcccctcccggacaggtaaggtttagcaagtcatgcttgaccctgttagtgcttttttattcctacatcatattgaggaaggaatggagctgtttttttagtgatgaagatgttttcctggtgatgcattcacactttcaactggcccttcctagatcaaagttagtgcctttgtgagatggtggcctgccagagtgtggtttgtggtcccatttcagggggaagatacttgactcatctgtggacctaattcacatcctcagcactcttttgctatcacaactaaccaatcttgctaagggatggttaagctaaaacacaagatctcagcgatcagagtttagcttggtatcatttacattaggaataagctgctggatacctctaaccagtggcagcttctaggaatacaaaaactacctcattcctccacctttcaagtgattgtgacatttgtattaaaactaatagctttttgataattttcctttgtttatacagatcgtgtacctcattctcagataattttttatgaatgaaatgaaattccaggcatcctttaaattttatttcaagcattctactggaaatgatgtgcaccctgcttacaaaatatttttaccttataacagtaatgcatgtttgctagaaaattcagaaaatacagaaaagtatttaaaaaattaaaactataatctccaaacccaaagataaccatttttaattataaaagtaataatttatttcaaaaataaatctaggcaacccaagaaaacataaagtagccagactcagtggtgtgcacctgtagttcttgctgctcagtgcctgaggtgggaggattgcttgagcccaggagttctgggctgtggtgcactatgctgatcaattgatcaatccactgtctgcactaagttcagcatgaatacagtgacctcttgggagggcaggaccatcaggttgcctaaagaggggtgaactggcccaggttggaagtggagaaggtcaaaactgctgtgctatccagtagtgggatgacatctgtgaatagccactgcactccagcctaggcaatatagggaaaccatgtctctttaacaataacaacaacaacaacaacaatcccagaaactacaaaaggagagtctttttggtgcctccagtgttagtccctgtccttccagccttatttttcttaagtatatgcacaatgtgaaaggtagataaattcatatccttagacaggtaaagcattcattaattcagggtggtatgcaaggatactatccaaggcatggtatccatgcaaggtgactgcaaggcctttgccctggagagaaccctatacatactctcaactgtaggagaaacactgttattttgttactcagtgcatcattgctatcaactcttggatttggcagttagtcaaatgaggttctaccatttaccaactaggagtctgtggccaagttactcaatctcctttctaagcctcttcctcatatgcaaaaagggaataataagtgttttataagattcatgcatgatataatgtatgcaaagtgtttagcatggtgcctggcatatcataactgttaaacaattattagccagctcctagcattttgggaggctgaggcaggcggattgcttgaggccagcagttcaagaccagcctgagcgacatagtgagatcctgtctctacaaaaaaaaaaaaaaatgtgttttcattagctgggtgtgttggcatgcacctgtggtaccagctacttgggaggctgaagtgggagaattgcttgagcctgggaggttgaagctacagtcagctgtgattgcaccactacacttcaaccatggcaatagagtgagaccctgtctcaaaaaaaaaaattatcagctattactataattatttttattagttcctcactcacctaaaatctcaaacacaccttagaaatacacatatgagaacaaccaaaaatgacaaagtagaagcacatatgaaaaggctaagaaagcatgaaagccagcaagaaataactgccgctcttctggtcagcctggaaagcaactggcattttccctagaacaatgttttcaaacttggttgcacattaaaatcacctagagaccttttaaaaattctgaaacccaggccacaccccgacaaatgaaagcacagtctctgggggtgggacataggcatcattttttgaaggtccccacttgatcctaatgtgcagacaaatttgaaaaccacagctttgggaggctgaggtgggtggatcataagatcaggagtttgagaccagcctggccaatatggtgaaaccccgtctctactaaaaatgcaaacattagctgggcatggtggcgcatacctgtagtcccagctactctagaggctgaggcggaagcatcagtgagggagaatcagtgaacccaggatgtggaagtttcagtgagcccagatcacaccactgcactccagcctgggcgacagagcgagactccacctcaaaaacaaaaagaaagaaagaaaaaagaaaagcagtactctggaacctaccaatccatcatttagcatatttgtgaagtaaagtgttattctggtatttgcagaaccagaatccagctttattgggccaggcccaatttttttaaaaaacatggtaaggtctcccagccttaaagtattacatagcatagctctaaaagatcactgtaggaagacataaaatggtatttcagtcatctaagggaaaaaccttcctaaagcactagcccctggacaactattatttaaacatctacagctgttcaatagatattgggttctttttggagggatgtgacaaaattcttgtataattagattgtgatgatgattgtatcagtttagtacatgtaaatacactgaaaaccattggattatacactttaaatatgtgatttgcatggtatgtgaattatgtctcagtaaaaatctagagatggggctgggctcagtggctcacgcctgtaatcccagtacttagggaggctgaggccagcggatcacctgaggccaggagttcaagaccggcctggccaacatggtgaaacttcatctctactaataatacaaaaatcaggccgggcctggtggctcacgcctgtaatcccagcactttgggaggcggaggcgggcggatcacgaggtcaggagtccaagaccagcctggccaacatggtgaaaccccgtctctactaaaaatacaaaaattcaccaggcgtggtggctgaggcaggagaatcgcttgatggtggaggttgcagtgagccgagatcgcgccactgcactccagcctgggtgaaagagcgaaactccatctcaaaaaaaaaaaaaaaaaaaaaatcagccagatgtggtggcaggtgcctgtagtcacagctacttgggaggttgaagcaggagaatcgctttatctcaggaagcagaggttgcagtgagccaagatcatgctgttgcattccagcctgggcaacaagaacaaaactcactccatctcaaaaaaaaaaaaaaaatatctagagatgggagaatcatatggctggcataaaaaggtcaagtcaaagatatgtaagattaaggctttacgatgctccagttctagtaaaacagaccaggtacttgttttggtgtgaaattgccaatataagtatagtactgtacatattagttgtttagcttaggtaagtcttttaatctctttaaactccagtttcctcatctataaaataaagagaatatctactttgcaaacttgttgtgagagtgaaaagtaatgcatataaagtccctgtatggagcaagtactcaataactatttgttgaactaaaaatgataatactgatattcaccatttattagcatccctatgtgccagacactgtaaacaattaaaagttatcattctggtacccagagtacagtatgagacagacatgcaaaaaaaaaaaaaaaaaaagataatggagatctgcatagcataagatgcagtgggaccaaacgggaaaaaacacctaaatgagcctggagaaaggaagaaatgatagaggtggtgatgcttgagctatgatctaaaggttgagtagtagcttgtcagacagtaaaggggaaaggacagggcagggaggggccattgcaagaaattccatgcagagggattatggtatttcattatcactgaaccttaaactgtgtgtgtggccgggtacggtggctcatgcctgtaatcctagcactttgggaggccaaggtgggcagatcacttgaggtcaggagtttgaaaccagcctggccaacatggtgaaacctcatctctattaaaaatacaaaaaattagccaggtgtggttgtgggtgcctgtaattccagctacttgagcagctacttgagaggtcgaggcaggagaattgcttgaacccgggaggcagaggttgcaatgagctggtgtcaggccactgcactccagcatgggcaacagagagagactccatctcaaaaaaaaagtgtgcgtgtaaaacagacagtctttgtaggagatgaggtgaagcaagtaggcaggagttagatcctgagttacctttgggccaagccaaggagtttttattttattccatatagatgacagtcactgcagaaatttgaactgatatgcatatatcatgaggtttttttgttttagaaatattattctgtcagtcataagtgaagggactggggacattgggactggaggcaaagagatcttatctctttgcaatagtttgaaagctattgcaatatttgaagagaagattgataaatgcttgaaccagcacagtggcagtacagatggagggagctgactacaataaaatcatcaggacttgttgattgacatgatataggaagtgagggacagggatgagtcaaggctgatccccctagatcctgactaaggaagctgggtggttgacagtgccattcacagagacagtgaattctggcataaacacctaataggtcaggctggtttacacctccatcattcccatgggagaaggtatagaggggtgtgtgtttgtgtgtgtgtgtgtgtgtgtaaaagaacacagaaagccagattcctctttttgacaccagaatattggttcccaccatagtcaaaaggatattcctgaggatcgaggcttggaaaaatattggggaaggataagaactccagttgttgctgctttttttggcagccagtgtaacctaggtaaggacttggttgaattaagaaatttcatgtccagatcaggatggatttttctatttctctgagctctggtgtgtttcccactcagattgcaggtcgtaggtacctacggtgtgaattgtgttgtgtttctgtgcttgtgcaagggagtagctaggttgctgggaggtctggatgagggtgggggtggggtgagatcaagtctccagctccaagaggtcccctggggctaagtgaaaagcttgctcttttgaaatggtcttcgttggtaattaacaaaagatcaagaataccttggtgtcagataaagggaatttgtaggcacaatgctgttggtagctgatctcaatcattcaaggaagctattaaatctatgaacattagcattctgccaggtaaagagatctggtccttagcacctcccagacacactgattctttactgttttgaaacatctccctctcctggcttcctccaccccgcttccatactgtccttgaaatcaatgaatggtaatttagtgtatctagtgtatcactagcaaatgtctgaataagaaaggtttggtttccgctgtgtctcctgttacaatgagaacatgtactgcataaatttaattggctacgttaatgtgtaagccttttctgcaaagagatggatccgtttctgaatattctgcagaagggcagagttttgagtatatggcagtggttctaattagcagttgctccaatacaatcagactgagacggaagctactcatttagaatactggttgatgacaacactggcttgaacaaagtgaccactctccaatggctactctccctctcagtgggccgcaggttgctagggctcaggctgtggctgttttccccgccgaaaaggggcggggtcagtcggtgtgttaggaaaaaaaatgtatatatatatatatgttgtctgcctccccacagagataacaacccgtggaaaaacatgccgttgagcgggaggaaggcgaaaagataggctgggttttttggggggtgggggagcgtggaggatagggtgggctttttcccctccaatgctgcgacgcattaaccctgctgctgttgggacgttctctgctcagcctattggctgagcccgggagccgctgtctgccaatcgggtggtgaaaggcagacaaatctaccccgccaccagcaaaaacggcgcgtaacccttgcggcgccggccgaaccgcgccagagctggcgcggggaaagggagataggtgtctccagctgctgtggctgtttggggcgggtcggcttcatccgcgtctcaggagcaagtagagaattagcgggcggcagcaatgctccgcaaggtgagaagctggacagaaatctggcggtgggctacccttttgttcctcttttaccacctgggttacgtttgtgggcagatccgctacccggtcccagaggagtcacaggaagggacttttgtagggaatgtcgctcaagatttcctgctggatacggacagtctgtcagctcgcaggctgcaggtcgctggagaggtgaaccaaagacacttccgtgtggatttggacagcggagccctgctcatcaagaacccaatcgaccgagaggcactgtgtgggctcagtgccagctgcatcgtgcccctggagtttgtcaccgaaggtcctttggaaatgtaccgagcagaggtagagatcgtagatgtgaatgatcacgccccccgttttccgcggcagcagctggacttggaaattggggaggcagctcctccaggacagcgtttcccgttggaaaaggctcaggatgcagatgtggggagcaattcgattagcagctataggctgagctccaatgaacactttgcactggatgtgaagaagcgcagcgacggcagcctggtcccagagctgctcctggagaagcctttggatcgagagaagcaatcggactaccgcctggtgctgactgctgtcgatggagggaacccgccgagatctggcaccgcagagctccgggtatccgtgctggacgtaaacgacaacgccccagccttccagcaatccagctacaggattagtgtgttggagagcgcaccagcgggcatggtgctcatccagctcaatgcctcagacccggacctgggtcccagtggtaacgtcaccttttatttcagtggtcatacccctgatcgtgtaagaaacctctttagcctgcaccccactactggaaagcttactcttttggggcccctagactttgagagtgagaattactatgaatttgatgtgcgggctcgcgatgggggttctccagccatggagcaacattgcagccttcgagtggatctgctggacgtaaatgacaatgccccttacatcacagtgacctcagagcttggaaccctccccgagagtgcagaacctggcactgtggtggcacttatcagtgtgcaggatccagactcagggtcaaacggagatgtgagcctccgcattcctgaccacttgccatttgccctcaagtctgccttcaggaaccagttctccctggtgactgctggacccttggatcgagaggccaaatctagctatgacatcatggtcactgcttctgatgctgggaaccctcctctcagtacccacagaactattttcctcaatatttcagatgtgaatgataatccaccctctttctttcagaggtcacatgaggtgtttgttcctgagaacaatcgcccaggggacctgctttgctcccttgcagcctctgacccagactctggcttgaatgcgcttatctcctactcactcctggagcccaggaatcgagatgtatcagcttcctctttcatctctctgaacccccagacaggagctgttcatgctactcgatcctttgactatgagcaaacccagacactgcagtttgaggtgcaggcccgggatcggggcaacccaccccttagcagcactgtaacagttcgtctatttgtgctggacctcaatgacaatgctccagctgtgctccgtcctcgggcccggcctggttccttatgtccccaagcactgcctccatcagttggtgctggccacctaatcacaaaggtgactgctgtggacttggattcaggttacaatgcttgggtttcctatcagctcctggaggccccagatcccagcctgtttgcagtctctcgatatgctggggaggtgcggacggctgttcctatcccagctgacctcccaccacagaagctggtcattgtggtaaaggatagtggtagtccaccactctctacctctgttactctcttagtgtccttagaggaagacactcatccagttgtcccagatcttcgagaatcttcagctccaagggaaggagaatctcgtctaaccctctacttggctgtgtccctagtggcaatttgctttgtctcctttggctcattcgtggcactactctctaagtgtcttcgtggggcagcctgtggagtcacatgctttcctgctggcacctgtgcctgtctcaccagatctcgaaggagggaggggcttcccccttccaatgggatcctccgaatccagctagggtcagatgaccctatcaagtttgttgatgtgggaggccactctcatggctgtacacccttggcttctgcacccactcggagtgatagcttcatgatggtgaagtcacccagtgcacctatggcaggggagcctgttcgcccaagctgcccaccctctgatcttctctatgggctagaggtgagacctttgcaggctcaacaaatgcttgagggttattctgatccaggcatatggctaggccatgtcctagagagtactggcctctcagtaagtgcccatagtgatgtcaccatttttgtaagaggtaactatgtggtagacgctgtgctttgtaactgtttcgtgaattaaccagagttgtcacagtttagcattgggggcgggtcatgcctatatctgagtaagaaatgaaagtaattggtgatcaagagccaggctgttgtggaagcatgatgatggaatgtgggagcacaggaggctacagtgcacagggtacagtgcaccaggcagtcacttggacaaaggtggctgttttctctactcttcctgaaagaggggatcagattctgaagtaccttaactctaggttaccatttcccaagggattgaggggaaataaaatctttgtctcccagtatctagtacactgtgaagggacctctctatttgaaacatagagacagcagaaagaggagagaactaaaggaatagagaggcacgcatcagagtggtggcatagatcttttggtctgggtcttaggactcatatcaagtccctactggggatttgaactagatgcggtaaattggaaggttggggcgggttggtcatcacctttggaaaaaacagtaagtgaaatcacttatgtcagaaaactggtttacagttggctgattcatagaaacagccaccctgtgcatctttaagttgagttctcctgaatttggtgaaaccatgaaacctagaagccaagccatccatgcttggcctctgaccaccctcctgggtgacctgattcagccccagaaatgttcccctacccaaaaactgtaacactcattccacatttggggtctggggtgtcagaaaagctaagtcccatgtcagctgacattgagatttccgcaaagcattgctggagagtcagggcaagactttacaaggttcttactaatcttttctctcaccttagcagcattcagcaggatgggggagggtgggggaatacatgggctttgcctctcccagaaggacaagattttgctggttcaagcaaagtggtggaagcttctgaagtcatgcaggaagttgctgggacagaacgctgaggagttttgtatcactttgtcttccctgttgagtaccatctgagctgtcaaactttgctgccaagggggctgaatcaacctgcagcacgaagtgagtggggaggtaggaagcttctgtgacacagatttgcagcctgtgttcccaaggtttccaggattgaggaaactccataattggttgagagcacacagactttttggccaatcagactcagagctgaggtgggagatctgctcttccagcccgcctctcctcctccagctccccagctccactcaaattcagctcccctcccccctgcccacccccgccactcggtgactaagaactgctgcaagcaggcaaacctccgagcagtttttaagaggctggaaggagacataagagacttcagctgctgcattccaagccctgggtctaccttggagacaggacagcacagacttactctccacaaagggacttctgggtcatggggcccaagacactcccacagctcgctgggaaatggcaagtgctgtgcatgttgtccttgtgctgctggggctgggtgtctgggcagcttcgttactcagtggtggaggagtctgagccggggacgctggtggggaatgttgctcaggatctgggcttaaagatgacagatctgttgagccggcggctgcaattgggctctgaggagaatgggcgctatttttccctgagcttgatgagtggtgccctggcagtgaatcaaaagattgaccgagaaagcctatgtggagccagcaccagctgcctgctgccagtgcaggtggtgactgaacaccccctggagctaatccgtgtagaggtagagatcctggatctcaatgacaactctcctagctttgccacccctgagcgagagatgcgcatctcagaatcagcagcatctggggcacgattcccactggacagtgcccaggatccggatgtgggcaccaatactgtgagcttttacactctaagccccaacagccacttctctctgaatgtgaagaccctaaaagatgggaagccattcccagagctggtgctagagcagcagctggatcgtgaagcccaggcaagacatcagctggtgcttactgctgtggatggggggaccccagcccgctcagggaccacccttatctctgtcatcgtgctggacatcaatgataatgctccaaccttccaatcctcagttctacgtgtgggaatcccagagaatgcacccattggtactctgctgctccgcctcaatgccactgatccagacgagggcaccaacggccaactagactattcttttggagaccacacatctgaggcagtgcggaacctctttggcctagaccctagcagtggggcaatccatgtgttgggtcccatagactttgaggagtcacgtttctatgaaattcatgcaagagcccgtgaccagggacagcctgccatggagggccactgtgtgattcaagtggatgtgggggatgtcaatgacaatgccccagaggtgctattggcctctttggccaaccctgtcctagagagcacaccagtgggcacagtagtggggttgtttaatgtgcgagaccgggactcaggtagaaatggtgaagtgagccttgatatctctccggacctgccatttcagattaagccttctgagaaccactactcgctgctaaccagccagcctttggaccgggaggccacatcccactatatcatcgagctgctggccagcgatgctggttcaccttccctacacaaacatctcaccatcaggctcaacatttcagatgtcaatgacaatgcaccccgcttcaaccagcagctttacactgcttacatcctagaaaaccggcctccgggctcccttctttgcactgtggctgcctcagatccagacactggggataatgcccgcctcacctactccattgtaggaaatcaggttcagggagccccagcctcctcctttgtgtatgtcaacccagaggatggacggatctttgcccagcgtacctttgactatgaattgctgcagatgctgcagattgtggtgggggttcgagactccggctctcccccattgcatgccaacacatctctgcatgtgtttgtcctagacgagaatgataatgccccagctgtgctgcacccacggccagactgggaacactcagccccccagcgtctccctcgctctgctcctcctggctccttggtcaccaaggtgacagccgtggatgctgatgcaggccacaatgcgtggctctcctactcactgttgccacagtccacagccccaggactgttcctcgtgtctacacacactggtgaggtgcgcacagcccgggccttactggaggatgactctgacacccagcaggtggtggtcctggtgagggacaatggtgacccttcactctcctccacagccacagtgctgctggttctggaggatgaggaccctgaggaaatgcccaaatccagtgacttcctcatacaccctcctgagcgttcagaccttaccctttacctcattgtggctctagcgaccgtcagtctcttatccctagtcaccttcacctttctgtcagcgaagtgccttcagggaaacgcagacggggacgggggtggagggcagtgctgcaggcgccaggactcaccctccccggacttctataagcagtccagccccaacctgcaggtgagctcggacggcacgctcaagtacatggaggtgacgctgcggcccacagactcgcagagccactgctacaggacgtgcttttcaccggcctcggacggcagtgacttcacttttctaagacccctcagcgttcagcagcccacagctctggcgctggagcctgacgccatccggtcccgctctaatacgctgcgggagcggagccaggtgaggggctcggcgccgccccgggcgacccctgggggcggcactggagaagccgcccgtcctcataagggattgaacttgcatccactcctctccggccggcttggtcgctggctgcgctccacccgattctcgggatcattggaccgtttgcgcgaaaccagagtggccgattaagggatggggctccgagcaccgggggtggtggcgactgtgggcgaggggaggtgggaccgacccccacccctacactcaaaaaaggccggggcctccttcgagcttccggtgaatttcgggcgatttccgcgggtgtcgggggtcccgggaggaggcagtcacagatccacccctgcagccagcctcctaggcgccggctccggcacgcttcgccggtctgtagatttcctcttcgatttctccccagctcccagcatctgtgacttcactgttaccctccctatccccgcatcacccaaccgcacctgtctgcgggacttaggtgtgcgcgcggggctcatgcgtgtcctccctgctggccacccccacggcccacacaagttgcacgggctcgccacgccccgccaacacgtgcgcggacgcacgcacgcactcctcgcacgtgggcttacgcgaataccagctttcactgccactcgctcgcggccagattcacaggcctgttccggtccactcgcagctcccctctgccgctccctccgccgggctcaggagtactcgtagctgattgtgcgcgcctgagggtcccagatcgcggccgcccaggaccaggcgaggactccggagcctcctctcacctctcccacctgcgccccgggctgggccgggtcgcctggggggcggcctgagcgaggcgcggggccaggagcgctggagcgactgccgctctaagtgccgggcgggcaggactctacgatccttgggccagaggtccggatggtcccgggactccgtctcaagggtcggcgacccctcaacccagaagcctcgagcaggcggacaggcagagctgcccagtggccgaggcgcggcagggctccgcgttgggcgagtgagtgagcctctataggacagcaggactgggactccagtggcaccagcggccccttcctcccgcaggaagtgaaagcctcgagcgccctggctctcaacccccagagatacaggcttttggcgccgtcgtgatcacaatgtgcccagcgatctagggtcagagatttggaggtgaccaaactatctgacactctaacaagtcctgtctcctctggcagatggaaagctataggctctgccagatgccagggtgcccttatgtgtgaggaaactacaatagtaaaaaacacaagtttctccaactccaggagcttttattcaaaatatatcaatgcctaactctgctcctaggactgtattttgaaacacccccaggtgattttgatagctgattgagagaaacttactatataactcctttgagaacctcatctcatttgctcttcccaccattgctgttggctaggtactaacatgcctctcttataacagcttcacagaggtcaagtgacttgctcaagttcacagagcaagtaagagagattctaacccctgtctaactccagaatgtgtgcttttaatttcttggcacttggaactttaaaagcttgaggacaggagaggggagttgcctctgctgggattttgcttctgctgggatggggcaagggtggggttccttcccttttaggaccttacatgtggggaaagtcttctgtggctcctcatttctgagcagtccccgcagcgcaaacttggccagttatccttttggagattgagttcccccagctccgtttcctcctatcacaatcactgcatttccatgtagattctgctgtgtctaagaatacagtggctgagggctggccatccctgtgcccttctccatggcagccccagaatggtgctggtgactcccgatacacctggaatgctaggtttctgggttctgctcatatcactgccacctgtgagccttgagtgagccactggcagttccggagcttccttctccctggagtaatctgagatactcacactctctgcttctgggagcaagtatgagtattaattaccagcccaccccagaaccagtgaggaggtggctctaggagtgctccatgagagtgtgtgatgggataacacaccccctggaaagaccagaagggactcaggaatgaagtggctggccagagccccacaccttcagctaggtgggagatggctacacatcagccccttgggagccctggagacttagttggccctgcttggaggctgtgggagctggatccctccccgctgcatcccttccatttttctccgtctcagacagagcagccttgttctcttctccttagtcacagaccattgtctggcacggagttctaggggtgagaagtgtcccgggacttggatgccccgcaaaggcccaatctggcatgactcctaaattaataatgtatttagctgtgggaagagattcttgcaagccaagggcccagagaagatgtccctgtgaatgtgtcactgcacaacctggcaccaaaagggttaccaagaacagcagccatcttgctgcagaggatgctttgttcccagctgaggagttgaataaattcattctagggctggtagaattctcattgaaaagcctcctttgccactttagggggctttgtctgcacctcttcccccagttccacagaagatgccttcagtccttgaattttggctcaggagttctgactctgggggcagggaggaaggggccatttctttaggaaaggagtctcagcttgctcactgtggtcagatgaaatgtgatttatctcttggtttctggtacctcagacctctgagacctgaggtgtattttgtctttggagatgagtccacccctgccccctcttagtccgttttcttctctgtgcccactcccctccttctctcccggcccatccctaggggctcgggtgacattctaacttctcacgggtactcagcccctttccctctgttttctccacagcaagccccgcccaacacggactggcgtttctctcaggcccagagacccggcaccagcgggtaggtgactgattctccagcccaccctcttctctgcggcattttctcagggatgacgtgggaggagatgggggagggcccagcatttgctacagatggcttctccctcagtttgagatcccagggaggtcttggtgtgcggggggctggcacacagaccccggaaggaagaggcgactgccctgactgttcaggaagctcaattcacatgcttgccccttccctcctcgccacgaccggcaccttttcctatcccctgagggcactgtggaaccaaaggatggtcttaagctggtctctgggtgaaagcgaggctttctatgcccatgtactgcctaaccccctcccctgagttgagctgggctccattatgacctggggctcaggcagaaaagcatttgaccggaggaggcggtccgcactcagcgcctcctccagagcctccagagccgaggctgactgcagcctggggagagtggaggcagcacagctggaggtggaactgaggaaggactgggcggggcatggagcaggcccccttctccggcccctcctcccactgtcctctgcccctacttgtcctgctctctgtctgtggggtctccgtgtctctgcccctttttcttgagtttccgtctttgccactttctcttacctctcagtccttccctcagtctctatctcgctttgcaatctctgcctctccctctcttctccatctctgtcttagcttccgtcttgattgctgcacctcagcctcagtccctttcatttgtctacttgcattgatctgtgccgcccactgtgcctgccatggcataagtgctcaataaatgtggagtgagtaactacacgggacccttagtctctttctccttctctatctctgcctccctgtccttgtcctggacctcttttctgtttctcctttcaccgtttcctagcgccttgtgttcttctatccccagcctctatgtttctctgtctctcactatttctgctttcctctctgttctttgtctctctttgtctctgtctctgtatatctttctttgtctctgtctctggtctctgtgcctgttgtctttttctgcctctttctctgttactctttctttatctctctttttcttttatcttgtcttttttctctgagcctctgtctctgtctctcatttttttgtgcttgtgggcaagccagcacacacaaccccccacccaccacccaccaacaccccgctctcttccttccctgcccctcacacactgagcctttgatcgcagctctccaccagacaccctcccatccaagcagccccagctgctcatttcaatctggtatgaattcctgctgagacaggaaccccctgcgggctgaaggggagggaaacttcagcagaaagaccttcagttggtctgagcagagtgggataggctctgcgccaggcctcccagttagaagtcaggagcctggaggagtctcagagcccagggagagaagcaggagcttgggccaccttaccctacctcctcaatggttgagtacttgctgtccacatttgccaagttgctacagatgctgagcttccaagagttatctttcccccatcctgcaaccaaccaaacccttgttgccacaaggacccaggagcccttggtgtatggcagagattccagcttctgggcatgcacagtcctgtcacccattttaggaacgcaaagcgcttcttagaaggcccctaaaaagcagcagatcaaaaggcttgggctgcccttgcccttcctttgaccccagctgttgtccttctccctgctggccttgccaaccttctcataagttatccattaagtcattaatgtattcattcgttcatttattcaacaaatatttatcgagcatctactatgagcagggccctgtgctaaacattgggctataggagtgaacaagtagatgtgatcccagaactcataggcttccagaccagcagaggagactgaaaatttgcaacaagtaacacttaaaaaaaaaaaaaaaggctgggcactgtggttcacgcctgtaatcccagcactttgggaggccaaggtgggtagatcacttgaggtcaggggtttgagaccagcctggcagccaacatggtgaaaccccatctcgattaaaaatacaaaaattagccaggcgtggtggcaggcacctgtaatcccagcgacttaggaggctgaggcagaactgcttgaacccggaaggcagaggttgcagtgagctgagatcacgaaaaaaaaataatctagccacaaatcacagtaagttctgagaggcagagaacaatgtgagtgtaatgggggggggaagatcagagaaggcttctaggaggaggtgacattgagaagttctaggccatttatgttccctctacctaccaccaccccaggccatacactggctttgaagcagaattcaccattgaacctggaagccccaccaactgcctctcatgtgtcctctggggtgagcaccttacccctgcctcaactcccattccatcaaatgagaggcttagtggcctggaatacatgtgggagctcttggagatatggaggagaaggtgcggaacctctctctctctcctctctctgcttccttagttaacttgtggaggatgcaacaaaccttttttttttttttttttagacagagtcttgctctgttgcccaagctggagtgcagtggtgcgatcttggctcactgcaacctctgcctgccaggttcaagcgattctcctgcctcagcctcccgagtagctgggacagcaggtgtgcaccaccacacccagctcatttttgtatttttagtagagatgggtttcgccacgttggccaggctggtttcaaactccccgacctcaactgatccacctgcttcagcttcccaaagtgctagaattacaggtgtgatcgcccccggccacaacaaacatttttgattcagcggctccaaagtgaaataagcgttaggatctagtccagtaacttcaacttctctccttcattcattcaacaaatggtcagtgagcactttctgttggccaggcagtgttctcgatgtgggaggcccctgccctcaaggagtttacagtgcactgaaggagacaaatattgaccaaataattacaaaaataaatgtgagactgaaactgtcataagtgctaggtagaattgtatctggtggtgtgggcgtataatagggatttgatttagggagcaggaggacatcctggaaatgaagttgtgctgagatctgaaagacaaatacaaattaaccagctaaagaaaagaaggaagagcattccagatggtcaggcataccagcttcaaagcagggctggtgttgagttcttcagtaaacttggttcaagatcaagccagctctgggtcacactgcctacacagaaggaagagcattccaaatgggaaaagcctatgcaaaagccttgtggtgaggcctcctgggatcaagggaatggcagggagttttctctttgctggcactggagtgaggggatgaagaggagaggttccttttatccagtctaaccctggttccagccttctgttgatgccctgcctcactccctccccaccatcttgcccactgccctccagcctggtctggtcagacacaccagcttcaaagcagggctagtattgagttcttcagtaaacttggttcaagttcaagtcagcactgggtcacactgcctagacagaaggaagaagacctggccaggtgtggtggctcacgcctgtaatcccagcactttgggaggctgaggtgggtggatcacctgaggtcaggagtttgagaccagcctggccaacatgatgaaaccccatctctagtaaaaatacaaaatattagccaggtgtggtggtgcacacctgtagtcccagctactcaggaggctgaggcaggggaatcgcttgaacccaggaggcggaggttgcagtgagctgagatcacaccactgcactccagtctgggtgacagagcgagactccatcaggaaagaaagaaagaaaaagagagagagggagggagggagggaaggaaggaaggaaggaaggaaggaaggaaggaaggaaggaaggaaggaaggaagaaaagaaagaaaaagggagaaaaaatgaagaagacttacattctgaagttcctgcttggcacatgcttctcctccccaccactatcccttctcaggtcatcctttgggtgtctgatcccaatagctgttgtctcaagctctgagcccagcaaaccatttcccccttcttaggctgtaacccaggccctgccctgcagctgtccccagcctctgcacaaagagtctccatttggtccctagactgttctctgatggctccacactaccatccctcctctgagagacagtatccctgctctctctcagtttgggcagtcattcaacaaacaaatagcaacttaatttttttccacttataaaatagtacatgctcattatagaaacatgaaaaatagaaaaaaaattaaaaggaaaaccacccatcattttacaatctagggagaaccaccaccaactacagtttaatatgaaacatttcaaatatgtacaaaagtagagagaatggtgtcatgaacctgtatgataccactatccagcttcaactaatgccttatcttgtttcacctatatccctacccttatcctgtccttggattcttttgaagcaaatctcagacatcatataatttcatcttggtctccaccatctttaacagatgacttttttttttttttttttttttggagacagagtctcactctcttgcccaggctgtggcacaatctcagctcactgcagccttcgcctcccgggttcaagcaattctcatgcttcagcctcctaagtagctaggattacaggtgtgcaccaccacacacagctaatattttgtattttcagtacaaacagggtttcgccatgttggccaggctggtcttgaactcctggcctcaagtgatccaccctcctcggcctcccaaaatgttgggattacaggtgtgagccaccttgcccggccagatgattctttcataaggtccacattttatatttgagtgagtgtctcttaagtatcttaatgctcttttaatgtaaaagacttcccctccatcttccatttttgcaatttatttgttgaatccctgccttttcatatatatctttctaaacttttctttgtgtaatcaaagaacatgcatgagcttcatttttatttttatttatttatttatttatttatttatttatttatttattgatacgtagccttgctctgtcacccaggctggactgcagtggcgcaatctcggctcactgcaagctccgcctcccaggttcacgccatgctcctgcctcagcctccagaatagctgggactacaggcgcccactaccacgcccggctaattattttgtatttttagtagagacggggtttcaccgtgttagccaggatggtctcgatctcctgacctcgtgatccgcccgcctcggcctcccaaagtgctgggattacaggcgtgagccaccgcgcctggccgagcttcattttaaaaaaatctcattcacctaaataagttgttcacaaacttgtcacactttcatgtgacactttattcacatattaagaactgttattcccagtcatacggtacatttcctactagttttttaaaaatagcaactgaggccatactgtccaacagaattatagcttttttcttctttgcagtgtatcatgagaatttccccatgtctttcaaaattcttcccaagtcatttgcagagtaactcctcttatgaatatacatattattttacagaataagtcctcatatgaatatacatattatttttctaatgctaatgggcttttgctacattagaaaacatacacattcatttacaattttttttttttgagacagtctcgctctgtctccaggctggggtgcagtggcgccatctcggctcactgcaagctccacctcctgggttcaagcaattctcctgcctcagcctcctgagtagctgggactacaggcacgcgccaccacgcccagctaatttttgtatttttagtagagacggggtttcaccatgttgaccaggatggtctcaatctcttgacctcgtgatccgcctgcctcagcctccctaagtgctgggattacaggtgggagccaccatccccagcctcatttacattttaacacaattaaattcagggtgttgtcagggtgacttcctagatttctcagttttttgagcatgatgtagggagtattttattatagtccagtctatgggatattcccttatacacacacacacacacacacacacacacacacacacacacacaccccaaactcaatagggcaagaaccatattcatcatctcttaaatcctaggtcctgtcacaggccactgcttggaaaatagttgactaaatgtagtccatttcttccatttttacttttcactattccccaaatcctggaagagtccctcatatctgctgctggggctccaaggcctccaagctgaagcccagtacgttgttgtgcataagatcataggccctggaatcatattaggctggctttcaggttgcaactctaccagttccagctgtgtgactctggtatagtctctcaacctctctgagccctgttttcatctgttggaaaatatagataatcacaacacttatctgcagggtgattccgaggataaaaaagacaaatatattacccagtcagcttagaataggaagctctcagtaaatggttaaaaaagaggtctctctccctctgctcatctcttacccagcttcacataattggcagcccacccacctgtttggccctcaaccttcaaccatttcccaggacgcctccttacactcctgatcatcatggttccaaccccactgttccactcagctttgttccctcaacaccactgctccctgtgacaggtcatcctcctaacctctggcatctggtcccgttgtctccctgacaacccgcatgctctcctccctgcaacccccgccgcttgcctgctctccctactttattcccattagcccccttcacctggggctgagaacacctggccttgaccctgcaccctcagccaggcccacagagctcagtcgggccggaagtaaggaccccagatattcagttgaggaatttaacattaatacaataatatagaatccaccagcagattttcataaatgttctgtgtgttcttttatccttttttttaatccaggattttatcaaggagcatagattgcatttggttgtcacgtctttcctctcctttaatctggagccagctcccagtctttttatttttttaatgacatggatatttttaaagagtccaggccagttgtactttaaaatgtccccgaacctggatttgctggctattctctgatggttagattcagattacacaccttggtaggaatacttcccgcagcatcacactgggactcatctaacgtcggcctgtcccactatcagtgatgccgagtttgttcgtgtggtaaaaacagtgtcccagatctctccattataaaaatatatttttataaagatattttaaaatatttgtgaaaatataagtaatctgtggatgatactttgagataggcagcaacccttcatgcaattttagtattccctgatgatccttgcctgtatctgtttttacatcagtgattacaaagcggtgatgttctgtcattccttctacatgtatttgctggtattcttctgaaaattacctggatgatttcttcagatttaaattcactgtcttttccttggggaagcctggactggctgagctgcctaaccctgactctctgtcttttttttttttttgacagggagtctagctctgttgccaggctggagtgcagtggcaaccttcacctcctgggttcaagcgattctcctgcctcagcctcccaagtagctgggattacaggcgtgtgccaccatgcccggttaattttttttttttaatatctattttagttgagacagggtttcaccatgttggtcagaatggtctcgatctcctgacctcgtggtctgcccgcccctgcctctcttcataccctctggtagcccctgacacagcccatggcaagtatcacaattgcaattactctattgtgtaattatttaaaatcagcctctcagtgcccaccatgagcaccgtaaagatggacagtttctatcatactcacagccacaaccccagcacctggctctgtgtctggtacatagaaattgctcaagaaagaattgttggaggggcgcggtggctcacgcctgtaattccagcactttgggaagcggaggcaggtggatcatgaggtcaggagttcgaaaccaacctggccaatatggtgaaaccccatctctactaaaaatacaaaaattcgctgggcatggtggcatgtgtgcacttgtcgtcccagctgctcaagaggctgaggcaggagaatcacttgaacctgggaggcagaggttgcagtgagccgagatcgcgccactgtactccagcctgggtgacagagcgagactccagctcaaaaaaaaaaaaaaaagaaaaaagaaaagaaataattattgaatcaatggaaacagaattacaactcttcccacttttgggaaggagaattgagattcctgctttccccttcaaccctagctttatgtttgttgtgatggtatagaggtcacacatggcagccttgtgtctgttcttaggctgagttcatctacttagggacggggaatcccagattgggcaaaaccaaaagcagggacagaccttggaaaaattgtaaagcagttcttggttgtgctcacccaccatgacaaaatatgcacacacacaacgcaacacacacacagacattttcatgccttcaaggcctaccctacagcctttcccatggtgccaaacccttcttcttaccttacagtcacttaactgtctctgctggtctcttcccactcatttaggcaacaaatatttattgaaaaacttctctgagccagatggtgccaaacagttacctaaagggcagactgtgtgtgtgccagggctgtttcccgccaacactcccctgcaaattgaaataatttcatccttggaaattcaaaaaaatcatgaaaattgtcactgtgggaaaattccaagtagagctgaaccttctaagaagcagagagttcttcttatggtttagtatttttttaaattatgaatcatttcatgttttttcaacactcggagtttctaaaagtctcacttaggtccaagtgctaggctttgtgctaggtgcttcagtaggaagcaggtggagtcgctgcctcacagaagccagtgtggtggaggaacagacaggcactacaacagctgcagtgtgactagtgccatgtggggcagccgctgggatgggagtacagtggaggcacctgcccagtctgagtggatctcctctgatatattttattcgtgtcatcatggcaaatgttgggggactggcattctagggaacaccatctgcccaggattcacagcaagagggaacttgagggataggaaagtgcaccttggaaaaggtttgatgatagagtgtttgagggcggggggtgggggttcttgtaaaataggaggggcaggttcttctatggccgtggattttactctgagggcttaggaagccattgaattttagaaatttcttctccctgctccagggtctcttggggcctcctacatctccccctaggtacctcctaggtccccactttttctctagctctggaacattctcttccatttcccaccttcacagtcctctggagaaggtctgatctccctcactatgacaggaagccaggctctctcatggtgggtgggggaatgcactatgttcaatgcattggaccagcctggccaacatggtgaaaccccgtctgtactaaaaatacaaaaattagcctggcacagtggcaggtgcctgtcatcccagctacttgggagactgaggcaggagaatcgcttgaacccaggaggtggatgttgcaatgagccaagatcgcgccactgcactccagcctggatgacagagtaagaccctgtctaaaacaaaaagaaaaaagcatcggaggcagcaaagagctggtttgagggactgacttgtgggattctggcttctgaaggattgtagaagtgcctcctaccttgctgagagaaacaggtcttgggcatggggtagggttagggtactaggtttgggagccctgggagaggacaggaggggcatgagctgtgccggcctgggagtctgtgctcaccatcctactctctccccagctcccaaaatggcgatgacaccggcacctggcccaacaaccagtttgacacagagatgctgcaagccatgatcttggcgtccgccagtggtaagtggtgtcagtgtgtgtatggaagagtgggagacctggggttctggggtgcatctcacagccaccatgcccacggactggatgtcaaacctgtgtagtttctccagatctttcggcaggtctgaaaggacccacaattccaaacataaagcctggaattgtggctaaggaacagcagaggggttgggggtcctgggatgcctggaggagagcgaacaaggaaaagactcatggagggaatagtggttacaagtctagctctggaatgggacagtgtagctcaggtcctagctctgctactatccttgggacttggatcgacttgctcaatctctctaaacctcagtttcctcagcctagaaagtggggacagggaccccaaagggttgttgtagagattaaatgagatgataccacaaagcatagagttctgggcctggcgcttggaagccctcaagcaatgaaagtgggtgtagaaatccccagccgagagaacacctcctctttatgcgaggctcctcttttgctgcccctaactccagagtaggattctggttttcccataaggttgactaagggcttcctttgtaatagagattcggctagtggtggttgtccctgaagagtcactagggcccagagcaggagaagaagaatatcatttgtccttaagagcacagcctaagctgggcgtggtggctcacgcctgtaatcccagcactttgggaagctgaggcaggaggatcatgaggtcaggagttcgaaaccggcctggccaacatagtgaaaccctgtctctactaaaaatacaaaaattagctgggcatggtggtgcgtgcctgtagtcccagctacttgggaggctgaggcaggagaatcgcttgaacctgggaggtggctgtggtgagcagaaaatcgcaccactgcactccagcctgggcaacagtctcgctctgtctcaaaaaaaaaaaaaaaaaaaaagagcacaggctttagaggcaggccaatctggattcaaatcctggcacctggcaccaccacttagcaatgagtccttaggtaagttattaaaccccctcggtttcacttactattaatgggcacagtattaacggatctcattgtggtgttaccagggccaaatgcaagtccctcagcacaggattggcagagagtaagggcacaatatattattatctttgctgacccaaacccgttttttactgggtagaaagcagaattagaataatgcctattaataaagactagcttctggagcagcaaatcctgggcttataaggaggctggcagaggatcaaggcattgccctatatcatgaactgatagccctgccctccagcatgtctggaggactggtgggtagagaaccaggtgaaatcacaagaagcactgtcatcacacctgggcacatactaaacaaactttaggggcctcctgtcaatgaatcctctcaatagctctgcaaggcaggtctgatttctcacactcgacagatgagagaaccgagaaggcacttgccccagggtcctcagttttgagctgccaagctgaggttctaacctggctcaactcctaagtttatgctctttctactatagggaccatggctgcctttggatccagcctcggcttctctattacctgagcaggatgagaggctgtcctcttcctcgagctctgctttattcttccagatcagggttgccagataaaatacaggatgcccagttacagttgaatgtcagataaacagcaagtactatttcagcataagtcagtctcaaatgttgcatgagacataatgtactaaaaaaaaaaatgctcattgtttacctgaaattcaaatttaactgggagccctgtacttttatttactaaatctggcaactctaccccagatgtctgtgaggttaagtggggccaggcctacagctgacggaaggacagagagagaggtggcagggactgctggcctcctgaggcagagctgtcccaggtctggtggggctatgattccagagaggccagagactgagtatgaaagtggcaggcggctgggtctgaggagatgccaagttggcctcttgagggaaataaacaggtatatttagctgttgtggccttgcgccctgaggccaggaagcagctttttagcctaaatccagatgttaaaaacagaaatgaaatcagtatttatggccccaaaccctccaagcaagtcatgcagctcgttcccctgtcaaggcctcccacctttggcccacacagggcctgaccctcgtctaagcctgcgccctggggaacggaccctgggggtggaggtggtgggtcaggccctgctctcactttcacacccgcttcctagccctgaaaccagagaggttcctgaagtccagcccagccaggcctgtggggctgctgagaggggttaagtaagagggagagtaaaaaccgacacttgggaggaggcttttaaaataaacatctgcggggagggatgctctcaaggaggctgcggtttgcagctcagccagctgtgttccagctaatcagcctccttgggctactctggagttgctgccttggccctgggatggggtaggttaagaggacagagggaggtcagggagctgggggctgagtttccctgagtagaggctggcacaggagagaaggcatcacccccacctcgtccaggccagaagatgtccagcttcttgaggctctcctaagtctgcctctcctgggaccaagagaaaatcccggtccttgaccaaggtgggccttggggggagtggggtgtagagggaggggcactggagaactgactctacagaaagtcaaagctggcaatccaacttcttcccctcagatttatagatgggaaaacaggcttgagccacgcagagacttgaccaagctcacacagttccttagtggcagagcagagcaaatattctctttcttttacattctggatttccatatcttctctccctcctggtccagcccaacctcagggcaccccccacgaggtgggcgggggatggctttgtcacttgcacccactcggggtgctactcagagatcttgggtgcacataggacgtgggtgggccgagcttctagctactccgtcaggcccttcctgtcattctgtctctgcctcccttctccctgcttctccgtgttcctcctcattcttttctgtgtgcagggagactacaccccccaccccgctctttctctggcgcctctgaggtcccccctctagcccctaaatcactctggaatcctggctctttgaagccagatctgggcccccctcccctaccccttccattcccaggctgggaaaggctgaagaggctgacggctggaggggagggggcggggcggtggcggatctggcttccttttggagttaattagggaaaacagagaaatgtcagcggaatgaaagggctgggggtgggggccagctggggtaggagaggaggaagtgggcagctgctccctcccactcaacccctctcccccgcccccagaaagctctcagctccggggatttgcgacatgaaatgggggctgtagaaacctgagcgctggtgcgtgaagagaaaaaccgaggcgcatcccggctctcccctcccgtgtgccctcctcctcttatgccggcttgaaaatatttcctgtctctctatttctcaatccctggttgatgtcccaggattactcagcctctccggctttagtcactctcgctacccgctcccagggtccagggtggaggcagagggaggctgggagagaagctctactgccagctgggcctgggctggcctgggcatccctgaggttttaactgtctcctaaccacagaggatctcagggcctccagcagcgagccccaatgagtcaaactcttgtttcctcctctcccacccccgacccagtcagggcaggtgaggggtagaggtgatggcatgctggatgtgacggtgttgatgatgtattgcacaggatgaagcaccatctcatttagtcctcacagcagccttcacagtgcgtacaaatcagctggcaattccgagaggctgcattctaaacaagttcctgggtgatgctgagccagggccagagtgtggacttctctgggccccagtttcttcttctgtacagtgggacgttggactggaggtgctgtctgatgtcacctagctgtggcactctgagcctgtgcctaaagtgtccctgagatgtctagtccccgagatcatcatctcctcagcttcatagagccgagctcttctccatcttctctctacctcccattcactcagaacagggataaggtccaagctgctggtggtgatggtgactgactgtcccttccagcatgcgcttaggtacacttgggcctgaatgcccctctaacaaatgctaccgggtatggccttggtccttctaacacttggttccctcatctgtaaaatgagggtcataccacatagctggctgggctgttatgtagaggttaaaagtgattgtgcatgtgaagcatccagcagagtgcctggcacacagtaggtgctcaaatgctgttttgaaatacaaaaattagctgggctagtggtgtgcacctgtaatctcagctactcaggaggttgaggcaggagaatcacttgagcccaggaggcagaggttgcagtgagccgggatcgcgccactgcactccaggctgggcgacagagcaggactccatcttaaaaaaaaaaaaaaaaaaatgctgttttgaaatggaggcttggaagagcactcttcacccccaccccacacacttactaacggaactaccgaatctctactcgtgccaggccttgcttggcaaaggctaggggcatgtaaagccatggtttcatggctgctgccctccaggagcccatggtctagtgtgggagtcagaggctcccttgagaaagccagggcaaggaactgagagcccgtgtcacagccctgagagaaataccagcgaatgtgttttgagcacttacatctaccaggcactattttacgtacctgacatacattttcttatttagcattcactaaaaccagaagaggtggttaccattatcatccccattttgcagatgagaaaactgaagtggcataaggaggttaggtagacttgcccaggatcacagtgagtaaggaaaggagctaggaatcaaacctagactttctcactccagagcctcttaacctctaccctcaactcttgtgaagagagactaccttggtgacccctatattcccagtgctcagcgtggtcaaggcccagggtgctgtataggcattcattaactgctggggatataagacagtgactgttgaggaccctaagtttagctcccacctgatcttcctctgtctctgcagaagctgctgatgggagctccaccctgggagggggtgccggcaccatgggattgagcgcccgctacggaccccagttcaccctgcagcacgtgcccgactaccgccagaatgtctacatcccaggcagcaatgccacactgaccaacgcagctggcaagcgggatggcaaggccccagcaggtggcaatggcaacaagaagaagtcgggcaagaaggagaagaagtaacatggaggccaggccaagagccacagggcggcctctccccaaccagcccagcttctccttacctgcacccaggcctcagagtttcagggctaacccccagaatactggtaggggccaaggccatgctccccttgggaaacagaaacaagtgcccagtcagcacctaccccttcccccccagggggttgaatatgcaaaagcagttccgctgggaacccccatccaatcaactgctgtacccatgggggtagtggggttactgtagacaccaagaaccatttgccacaccccgtttagttacagctgaactcctccatcttccaaatcaatcaggcccatccatcccatgcctccctcctccccaccccactccaacagttcctctttcccgagtaaggtggttggggtgttgaagtaccaagtaacctacaagcctcctagttctgaaaagttggaagggcatcatgacctcttggcctctcctttgattctcaatcttcccccaaagcatggtttggtgccagccccttcacctccttccagagcccaagatcaatgctcaagttttggaggacatgatcaccatccccatggtactgatgcttgctggatttagggagggcattttgctaccaagcctcttcccaacgccctggggaccagtcttctgttttgtttttcattgtttgacgtttccactgcatgccttgacttcccccacctcctcctcaaacaagagactccactgcatgttccaagacagtatggggtggtaagataaggaagggaagtgtgtggatgtggatggtgggggcatggacaaagcttgacacatcaagttatcaaggccttggaggaggctctgtatgtcctcaggggactgacaacatcctccagattccagccataaaccaataactaggctggacccttcccactacataatagggctcagcccaggcagccagctttgggctgagctaacaggaccaatggattaaactggcatttcagtccaaggaagctcgaagcaggtttaggaccaggtccccttgagaggtcagaggggcctctgtgggtgctgggtactccagaggtgccactggtggaagggtcagcggagccccagcaggaagggtgggccagccaggccattcttagtccctgggttggggaggcagggagctagggcagggaccaaatgaacagaaagtctcagcccaggatggggcttcttcaacagggcccctgccctcctgaagcctcagtccttcaccttgccaggtgccgtttctcttccgtgaaggccactgcccaggtccccagtgcgccccctagtggccatagcctggttaaagttccccagtgcctccttgtgcatagaccttcttctcccacccccttctgcccctgggtccccggccatccagcggggctgccagagaaccccagacctgcccttacagtagtgtagcgccccctccctctttcggctggtgtagaatagccagtagtgtagtgcggtgtgcttttacgtgatggcgggtgggcagcgggcggcgggctccgcgcagccgtctgtccttgatctgcccgcggcggcccgtgttgtgttttgtgctgtgtccacgcgctaaggcgaccccctcccccgtactgacttctcctataagcgcttctcttcgcatagtcacgtagctcccaccccaccctcttcctgtgtctcacgcaagttttatactctaatatttatatggctttttttcttcgacaaaaaaataataaaacgtttcttctgaaaagctgaacgtttctgtataagcgatggaagctcctggcatgtgtgcatgaagtgatgagctgaggtgggtgctggaagaagggcggaatcgggaggccactttgtgtcattgcgcgtctagatgtttccgaattgcgtgtgtgtgtgtgactgtgcaatatggttgtgtatgcttgcaatgccgttgtgcctatgagacagtgtgcgattgtgtgcctatggatctgtgtaccgtgtgccattgtgtgatcggtccgctgtgggggtggggatctgagtgcggcgtgtcagtgtgcagtggagtgtgcagtctaagcttgcggctgtctccaggcagaagaggagaccccggcgcgggcgggggcgggttggcgccgggcaaacgccttgggtagaggggagaggacgtttcgttagttcccgccccttcctgactaaaattgcctacccgaagcgccccggagggcttcacgggaggagggtagactctcctttgcccccgcacccccacccccgctgcctaggggttttgggaaagccgcgggagtgggagggaatgcgggaggtgattcttccaaagccaagtctgcagctcgagcctcagtttccccatctggaattcgccttcccgctgacatctccgtagcgaagcctaagaaattggagggctcatcctcttcttgcgggggtcaaggggactgaaaggacgtgcaggaaatgagatccatcgcagactcagctcccctccctccttcctgtcggtgcttttccactcactcgcctgctctcccatctccccgccccctccgcctgcctcctcgaagcactgtgggattccgaggttgctgcagccagagaagctgcagaaaaacacggagctgggggtgaagggggacttaaaaggggaactacccggaaggacccaagaacacaaagacagagccactgcggttatctggctggtcagcaagggtatgcggcttcctccgcgctgcggaggctcccagagccaggtcacccattctgccagctcaagtctgttgtcatgggaaccaaaccttccaacttaagaatctgggggcgactttctagcgtgggaggaagggtggtgtgcacggttgctgagatggaagcagggttttgttactcagagccaggctgcggaggggcggggtgccgggcgcctgggttctattccaggcacagcagcagactggcagagcgcgtgagcagctgtggtttgtcccctaattggtatgtgtgcctataaagctctgaaccagaaaggcgtggcctccggggggacgggagggaggcggcaggcaacccatccccacacctcaggccatactgaggaggcagctgcccaggctccagggctatttaaaaggcttttatttccagttccagagcccgcccgaatgggtttgtggtcctctccaggcctctccctgtctatcctgggcctgctcattgctggtctggcttttttgtgcaggtcataacg

SEQ ID NO: 459 - DNA, 28377 bp, Homo sapiens
  source 1..28377: mol_type = genomic DNA
ctggccagggtgtgggggaacccatttgagaagagggagaaggtgacacaattcctttgggcaacttatgggaggggtaattggtgagggatgaaagccctgccaagtggcaggaggcccagctggggctgcccctcataagagtgcagtggaggatatgggatgagaagtgactgcccctctggttccatctgtcgcagagcccagggtgcttccttcctcccccacctccctcagaacacacccactgcatgctggacagcagcccccttcctgggcctggggacatccatgtccctctgtgcacaggcttcatcattctctgggtgcacggtaacgaccccggtaggtgagaggccaaggtcccaaaggggagcagcagggaaagttagctcccatctattcttgctccaggggaggcctttgatgaggaagctgccaaaagcacattgcaaatacaattccaattacaggcaacaggaaggagaaccacctctgccacctctgtcagcaaaccatgagctcctactctgtgctgcgatggcgggctcgatggggataactctgaccttacctcatggagtcactgtcaacccactggttgcactgtctttgtgcactggctctctggagtgaggtctttgcaaacaaagtggaaagagcatcaactttggactccagcacctagattcagagcaggccatttcactcggaatctgctgtgcatctgcaagggaggatcataaattcgcctttgtttcttcccagtatcgacagcccttccagaaagagcaagcctcatgtcatgccacatgtacaatctgaggccaggagctctctttccccttttcatcctcctgcctggtacacaataggtgtttactggatgcttgtccagttgatttcttgaacatggtgtgtaaaaggaatctttgcaaattgaatcttctggaaagctgagcttgtgcctaccatagaattctgaatgtacctatatgacgtctttgcaaacttaaaacctgaatctttgtagtataaatcccttgaaatgcatgtaggctggacatcaaaagcaagcaatctcttcaaggagcagctagttggtaaggtcagtgtgcagggtgcataaagggcagaggccggagggggtccaggctaagtttagaaggctgccaggttaaggccagtggaaagaattcggtgggcagcgaggagtccacagtaggattgattcagaagtctcactggtcagcaggagacaaggtggacccaggaaacactgaaaaggtgggcccggcagaacttggagtctggcatcccacgcagggtgagaggcgggagaggaggagcccctagggcgccggcctgccttccagcccagttaggatttgggagttttttcttccctctgcgcgtaatctgacgctgtttggggagggcgaggccgaaacctgatcctccagtccgggggttccgttaatgtttaatcagataggatcgtccgatggggctctggtggcgtgatctgcgcgccccaggcgtcaagcacccacaccctagaaggtttccgcagcgacgtcgaggcgctcatggttgcaggcgggcgccgccgttcagttcagggtctgagcctggaggagtgagccaggcagtgagactggctcgggcgggccgggacgcgtcgttgcagcagcggctcccagctcccagccaggattccgcgcgccccttcacgcgccctgctcctgaacttcagctcctgcacagtcctccccaccgcaaggctcaaggcgccgccggcgtggaccgcgcacggcctctaggtctcctcgccaggacagcaacctctcccctggccctcatgggcaccgtcagctccaggcggtcctggtggccgctgccactgctgctgctgctgctgctgctcctgggtcccgcgggcgcccgtgcgcaggaggacgaggacggcgactacgaggagctggtgctagccttgcgttccgaggaggacggcctggccgaagcacccgagcacggaaccacagccaccttccaccgctgcgccaaggtgcgggtgtagggatgggaggccggggcgaacccgcagccgggacggtgcggtgctgtttcctctcgggcctcagtttccccccatgtaagagaggaagtggagtgcaggtcgccgagggctcttcgcttggcacgatcttggggactgcaggcaaggcggcgggggaggacgggtagtggggagcacggtggagagcggggacggccggctctttggggacttgctggggcgtgcggctgcgctattcagtgggaaggttcgcggggttgggagacccggaggccgaggaagggcgagcagagcactgccaggatatcctgcccagatttcccagtttctgcctcgccgcggcacaggtgggtgaaggagtgaatgcctggaacgtactgggaactgcaccaggcacagagaaagcgggcttgccattatagtgggttccgatttggtttggaaaacatgggcagcggagggtggagggcctggagagaaggccctacccgagacaggggcggggtgggaaggacggcagatgctgggagcacgaggcaatttctttatgacacagaactcatgctctagtattccatctgtttcagccgaagaaaagaaccagctgaaggggcaggggagaaggggcggaggtattctcgaggcccattggcgtcctttaggactcaggcagggaagggcccttggtgctctggagccggaggtggtgcgcctggtactgggaccccggagctgagcccggcgcctcagcccacctggctgtctgccgaccgtgtgcggggcgagtttgctcaacaactctgccagcttctggccctcaggctgtgggaagcttcttcccggggcgagaccactagctttttctaagtattaccagcccaggacttggctgaggttctgtgtcccccagcttggagtcagatgtggggttgaatcttggcttcctctcactagctgtggtgcttgacaagtcacttatccttgagcctccattgcctaatctttaaaagggaggtgacaatcgtccctacggctcagtggcagcagatggggagatgaagggaaagttctgttgaccatgagtgaacttacaatgcaagccccggggggatcacttgcagttttgtccctgtctgcagtgtgacctgttggtgacattgtctttgctccaaaccacagctcctggggcagaggggaaaattctgccactcacagctgcctgcccacgcttctgtctgagtgtgctgggtggcaggatggcaagtccttactcagctcagtatagccctcttccttgttccctgagcctttgactttctcgagggatgttgtggggttgtggccaggataagaaagggcatttcaagttaccactgctccaaaacaactgttctggaaatagtgagtaccccatcctgagaggtgagtaagcagaggctgtatgaccacctgaaccaagcccttgaggatgtttcttctctggtggaagtttggaacaggagcctcctcaagttcatttattcattcattcaatggttattttgtgggaatcgaatttagaatgaaaatattttttggcaagcagaaaataatttttagaccaatccttttcttttagtcatgagaaactgaggcccagagagaggaggtcaccccaggtgcattagaactgggtttccagaactgacactccactgcacagagtactctcccaattcattcaatttttatttagcggaaggcattttcagatgggtctttgaagcattagtaggagttcagcgatgatggtgtcatgagaattttattctaggattaggaggtaccatgaacaaagatacagagctgggaaaaccagaggtggaagataaggagcacatgtccacagttctttttcttttttttttgagatggagtttcgctcttgttgcccaggctggagtgcaatggtgcagtctcagctcactgcaacatctgtctcccgggttcaagtggttctcctgcctcagcctcccaagaagctgggattacaggtacctgccaccacgcccggctaatttttgtatttttagtagagaaggggtttcaccacgttggccaggctagtcgcaaactcctgacctcctcagtggatccgaggaggtgatcctcccgcctcagcctcccaaagtgctcgaattacaggtgtgagccaccacgcctggcctccacagttctttatccaccgtctgaaatgtaaaatgttacgaaaaccaaaagttttttttgtgatttatttgatggtagcacctgacgtgaactgacatgagattatttttaatttagttgtgtgaatatgcatattcatatattttgctgcatagattacagtatgcagctccagattcttccaagcagactctgattgcccattactgcctttctaaaatccaaacaagttctgaggttcaaaaccgttttggccctaaggctttgggtaaagggggtggactctgttctactctgactggagtccaagatgcatatatacagagatatgggtgatggggctgcaaggtaggttgaggtaggggccaaggaggagcatggagtttggacttgattcatgaggctgtggggagccagtgaaggttcttaagcaggtatgtctgcctgagagcagttggagcagacaagagctaaaaaccaaacaaatcaccatagatagtggctgctataatttgtttgtcccctccaaatctcatgtggaaatttggtcctcagtgttggaagtggggcctaatgggaggtgtttgggtcatgggggaggaacccctgtgaaaggcttggtgccgtccttgtgataatgagtaagttctcccgctatgatttcccttgaaggctgattattaaaaagagcttggcacctccctctcttctctcttgcttcttctcttgccatgtgattgatctctgcacatgtaggctccccttcaccttctgccatcagtgaaagcagcttaaggccctcaccagaagcagatgctggtgccatgcttcctggagagcttgcagaatcatgagctgaataaatcccttttccttgtaaattactcaccttcaggtattcctttatatagcaacacaaaaggactaagacagtggccttgacttttctctctctttaagaagtgttgcctttgctcacttagtcatcccttctgcctgcatttgtagagcatctggatgggagatttatataaccgtcactcttgactttcccagcaggcctatgtcataggtactgtggtctctacaatacagcagaggtatctgaggctccgagaggttgagtgacttgctcatggctgcacaaccagtaaatattggagctggaattcaggtccacggtttcctggctccaaagcccatgattttttccctcaatttattctgactggggcatgggggagggggtggcctttgggcagggccaccaggagcgaccaggcccgtagagagctgggtgcaggtacagaggaaaacctgttgtcgagtgtggcccgtagttcccatttttgcctgaatggcacatttgaaagtgttatataaccatgtgaataataatagttggcctatatgagttctttaatttgctttttggtccgcatttggtaacttctttatcatctactatactctgttgtgtctcttttgttgtaatttgtaagtaggggtgagataaagtacacctagggtttgctgggtttcttccatgtcatcatgttcctccttgcatggggccaggatccgtggaggttgcctggcacctacgtggtggtgctgaaggaggagacccacctctcgcagtcagagcgcactgcccgccgcctgcaggcccaggctgcccgccggggatacctcaccaagatcctgcatgtcttccatggccttcttcctggcttcctggtgaagatgagtggcgacctgctggagctggtgagccaccctttttgggaatggcacttcctgatagggctgggccactgcatatacactggggactgtgcttagtaggcccattgctgaaaatcagaaggggacagcaagtatgtattgagcacttatcgggtaccaagcacagtaactactggctttctgtatagaattccctttaagcctggccatgccccagtggtacgtctatcttcatttgaaagacgaggagactgaagttcagaggggaccacacagacagctaggggtagagcctggatcaaacccattggtctgcctgccagccattcttgtgccaatgcatctgctgcctacggaaacctgtagggacaaggccctgggatgttcagtggagcctgagtcattttataaaaaagcatgactctagggtccaaaattcctttgaagctgttgctatccagagtgaagtcccttctttaggacagggtggccctcctccctcctggatgtcacatcttcggtggaggggcagaaaggggactgggtattctcctcaccctggccctagtgcttcaaatcttaaaaaaacgtttttatttgtgcttctgcaccaccttctagcccacctcgtttcctggcctctaacttgatgagagcgtgtgtcattttcacactgattctccacatggcaggcggtgcttcttagcctcctgcagacagtgaggccccacggtcttgtccaaggtcacacagcgtgtaatgggcagggtcagagtctggagtctggacctgggtctcctagctgcactgcactgctgccccatgggttaatcagctcagcataccgtggctgaacagctacctcataccaaggcctgtggcgccatgacagggattgacagggtccctgccttggaaacccgtagtctaagtagaggagactgacaagtcaatgccttccatcagtctgctcaacacacgtttaccaagtgcctactgtgtgctgcagaggcgaagatgacacagctcaggcctttcccttgagcttacagttcaggaggagagactgaccagtgactgccagtacagttgactatgggacaatgtgctcagccttggggagagacgaagaaggtacccgtatagcaccagatgacaggcacgagccccacaggccagggcagctgctcagaggagagtaggccaagcagaaggcaaacagaaggctgcaggcatttgccatcgagagctggacttcaaactgggcatcataccagcctgggttcgagtcctgcccagccccttattggctgtctaaccctgagcaaatcccttcacctctctgagcctcattcctctatctgtaaaccagttataataattggaacattcatttaaggactaaatgaggtcgtgaagcattcagcagatgctaggtacggaaactcgctgaagtgggggcaggttaagaagcctctggggatacgaaggcatccagggactagttgtggcaggaggctgttaccacttaggtctgaagggtaaggagagggaatagctttccctctgcccagttggagccggtggcatggaggagaggctgcctgtggggaatcacccgagggttcaccgctgccatgcgcagggagtcaggaggtagggagggagtggggcagatgcacaccatttttttttttttttgagactctgttgcccagactggagtgcagtggtgccatatctgcacctctgcctcccgggttcaagctcactgcaacctctgcctcccgggttcaagcgattctcctgcctcagcctcccgagtagctgggactacaggtgtgtgccaccatgcctggctaatttttgtatttttaatagagatggggtttcaccatgttggccaggctggtctcgaactctcgacctcaggtgatcccccacctcggcctcccaaagtgctgggattacaggcgtgagtcaccgctcccagctgctgatgcactcttgtccttctaactcctgctagtgcctcccattggctgagcccaactggaagctttgcaagggagctggtgctgcagtttgcactgagcaggctggagaaggctggagaatagactaggggacaaaccgaattgccagtgctgttatgtcatgatttaggcatggagtccagggcctgagcttcactccatgtccatcctgcccagagccttggcacagcctggctcccagacaagatgtcaagttcagaatccttcctaaaaggaatcctctatgccagaccgtgttgcagggatatgggagtgctgggctcccagcctgatcaaggagcgagaaaactcaggctcctagtctgtcctccggggcactagcagggacaaggtgggaggctgctgggctgggatgtggggacaggtttgatcaggtaaggccaggctgtggctgtgtttgctgctgtccaaatggcttaagcagagtcccccggcctctctggcttctgcaggccttgaagttgccccatgtcgactacatcgaggaggactcctctgtctttgcccagagcatcccgtggaacctggagcggattacccctccacggtaccgggcggatgaataccagccccccggtaagacccccatctgtgccctgccccaccccatctgagctgaatccatttgctctgccctggcctggcctccctgctggtggtttccacttctcggggggctttgggactcagcacctccactgacccctttttttctgtcccatccccatcccctgcagcccccactgcctgccttcctgttgccccacaaatgcaaaagtcttgccttaaatgatcctcttttccttcttttctcttgttttccttttctcaccatttggaatggcccagcaggctgcacttaccttggaaggagggttcatctgatggtgactctacctagggcccccaggcctctataactcccagtgccctgcagactggaccagatcctttaatgggatagacacaaccctgtctgggatgcctctgcctaccttcctgttttgctgctccacctgcctccagctccgtttggcttcctggggctccctgcctgggccactttgtgtcttccctctaggcctttctttccactgttccctctgcctggtgtggcctggctatggaagggagggaggaggagcggccatggaaaacggtctgcattctagcagggacttgcaggtggcaattcagtcggggaagactctagatgcacctggcctgaggagagaatgaagggttctagttggactgtgttaagtttgaggtgcccatggtgtgaggtctggagctcagcgcagagatgatgcaatgtggtgggtccatgcaacatggtgccaggacgcagagcttggggtgaactcagctttcaccccttaccggttctcgtgggatcttgggaagccactttcttctatgagctttgtcgttcttgtctgtaaaatgggcacataaccctgtccctgtccttctcacaggttgctgtgagactccaatgagttgaaggatgtgcagatgcttttggaagtgaaaagttggggggctactgtgtgactttgcatacacccaaactgtgtgaccttgcatatgtctgagttgctgccattgcaacagatcagagctggtgggctgggtgtggagaaagggtttgtgtgggggacatcctctggcaagggtggcagcagcagaagtgaggggcctggtcggtcatgtgtgctgacccggcctgggcagcctgtggccagggagaggacagctcctctgtaggaagagcctgttcctttccaaccaggtgagacctcttcagtggagccctggagccccctgtactccacatcagtgcctcagggacctcccggagcaggctaatatcagagaccaagagggacactggcagaggatcacagagaccccagtccaggcagggactgagaagatcttgccccctaagttagtttcctagcactgctgtgacaaattaccaccccctcggttggaacaagttgattctctgcagtcctggaggccagaagcctgaatcagtgtcggcaggaccactttctcccggggggctccagggagaagcttctcttgcctcttccgtgtcccaacagcggcagcacaccaatcccagcctctgtcttcacacagccttctctgtgtctctctcctcttcattgtctcataaggacacttgtcattggatttagggcccactggatcctccaggatgatctcatgtggggaaccttaaccacatctgcaaggaccctttttccaaataaggtcacagccacaggttgtgggggttaggatgtgagtgtatctctttggcagccactgttccctcctctcccttgggccagaagcagacgtggggccctttcttccccataggatgcccatggattgccccccttcccgcttcccccgagtgtctgtgggaggtggcaggaatggcaggcaggggtgtggaaccccttctggagtcatatcaagggcttggctggaggaagtcctcctggagctgttgggctggcatggggcaggctggctgggcccagcagcagcttcttcattcatggggaggccacaagcatgggccctagagctggctgccgccctcaaacccagaccctgcactcttaactgtgtgaccttgcatacgtcactcaccctctctgatcttcaggttcctctgcaaaagggaggtaatgataaccctcactctggggggctgtttggagggttaaatcagttattgctgtagcatgcatttctctgtcaggtattgagtgaggtgctgtgattttagccctgcatttttcttttcttaccattcaataataacgttttgagcacccactgtgcgccaggcaccatattaggtgctggggatacaaatgtgaatgaaatgaatgtggtctcttcccccaacagtgtatccagaagattaatccattccttaaacaaatgctacttgacacagattagttctggataggctgagagctctgaaggagtgcaggcagctgcgagcctgtgtatccagcagaaggatcaggaaaggattcctggaggaagcgctgttctagccaagacctacgggggcattattaaccaggcaaaggggacggtgtccaagcagtggaatgaacgtggattgaagctgtgaggcaggagggagtgtggcctgtgcagaagggaccgaggctggtgagaccaggagggcctgggtggcctccaggtcagatgtgaaaggaagaacttggccacagtctgagcttctcaggcgtatggcagggctgcctggtgagagggaatgagctccctgctctggaggtatgcaagcaggactgggctctcacctgccagaggccacagagctttccagaggctggaagaggccactccaaggcctctttgcccctgagagtggtggctcttcttgaggccaccttgccacgctgtcacagggaactagcagcccctgcctcacccgggggtttggaagatagagggaggcctaggaagggccctgtgtctcatccgagctgggcccctttccagcctctcactggaaggaagcccaaggatgttcctgtgggggcttttaccaggcccacctgccctctgctggccatgcttgcagcctcctgaccctgtcccagcaggacagtgggctggtgtgagcgggcaggaaccgcctgcacttagaaggtgtggggctgcctccccgagcttccatctgccgctggggccacaccccaggcccagggatgggaccccacagtggtcacatcatcttgcagcagaacccaggtacagctcctggagcagatggtggtcccaagcacgggtgggaccagaaaggactctcacctgggctaactcagctgcagcctcagttccctcctcacacacgacgaggaacatggactggaagcctgcccagcaggccttctgctcgatgtgcgttgtgtggcttacgtccagggagggaagcagcctctgtgctgtcttctagataagcctgtattccccgggctgtctgccaatgtatccagttgtcccgtcagcctggaagctctgagggaaaaccttgggctgcttcctgagcacctgtatcccctgcagccagcccggggcctctgctaggagcagactgagcatggcttatgggcctggcaccatctggcctctgcccaccttgctggccttgtcttgtgtctgccccttcgacattccatagcccagctcaatatctagtggttcctctagggtggcgagcactgtttggtctccagatgtcttcaggtcggagctcacagcgctctcagccaccccttcccagtgtagcaccgggcacatggtagatgcctattgatgagtgaaagctcctaacacactcagagagcaaggactccgcctcatcccacagcctgggaggagaggcagactgccaaggacctgctcagcatgctacagaagaaaccaaagtgcccacgggactgatcagtggagcttcctgccgagactggaggccttagggcagggtagacagtgtgtgtgcaggctggggactcacagttcggactgtgcccagacctactagcatagtgggtgggtgggaggatgcgggactgggggccgaccttgcctgaaattcatgtgggatctcagagcagccactgaattgctctgtagggggctaaatagtggcccccacagatacacacacccagacagagcctgtgagccagaccttatttggagaaaaggtctttgtagatgtaattaagcatctcaagatggcatcatctggattatgcggtgggctgtaagtcctgtgatgtgtctttatgagagaaaggcagagggagatttgacacacacaggaggggccacgtggagacagaggtggagattggagaaatgtggccacaagccagggaacaccagcagccaccagaagccggaagacgtgaggcagggttcttcccagagccttcgctgctgagtctgggaatttgtgaccgaagccataagaagtgggtacacgccctgagcctcccacacttgctcacctgtcctgagatgagaatctctactctgcagcatatttggaggatcactgcgggggccacagaggtgctgttcagatggcacttcagaagactcaggagaccctggggcaggagcagtttgactgacagcccagagggctgccctctgattccacctgaggccctgcttttcctggctgcaggggttccagggccaggccatttccgctggcgcaggactctgctagcagcaacctgcctgaagtcttcctttggcctggctgagagtttctgagacctgcgctggagcggaggtgcttccttccttgcttcctttcttcctctctcccttctccatccagcaggctggacctgcctggcatctgtgagctctccctactttctcctataccctaacctttgtcctgcatgggcgactcccccagtgagtctcttgcagcttttaccccagtgcctgcttcttggagaatccaaactgatccagttagggatgataaagtgtagggtaggcgctcggtgactgttttctctgaggttgtgactcgtgtgaggcagaagcagtccccgtgagccctcctggtatcttgtggagtggagaacgcttggacctggagccaggaggcccagacatacatcctgtccgagctgcagcttcctgtctctaaaatgagccggccagcgcaggtggccagacatcactgttattctcctttgagtctttaaatcttgttgtctttcttgcagactcggtgagctgtgaaaggctataataggggctttattttacactttgatactattttttgaacattcatattattgttagatattgatattcatatgaaggagcaggatgacttgggtccttcttggcagtagcattgccagctgatggccttggacagttacctgccctctctaggcctccctttccttgtctatgaaatacattatagaataggatgtagtgtgtgaggattttttggaggttaaacgagtgaatatatttaaggcgctttcaccagtgcctgggatgtgctctgtagtttctgtgtgttaactataaggttgactttatgctcattccctcctctcccacaaatgtcgccttggaaagacggaggcagcctggtggaggtgtatctcctagacaccagcatacagagtgaccaccgggaaatcgagggcagggtcatggtcaccgacttcgagaatgtgcccgaggaggacgggacccgcttccacagacaggtaagcacggccgtctgatgggagggctgcctctgcccatatccccatcctggaggtgggtggggactgccaccccagagcgttgcagctgtactcctgggttgcaccccccccagctgtcactgtcccctccctgccatcagttgtgggaagggcgttcatccatccagccacctgctgatttgttatagggtggagggggggtctttctcatgtggtccttgtgttcgtcgagcaggccagcaagtgtgacagtcatggcacccacctggcaggggtggtcagcggccgggatgccggcgtggccaagggtgccagcatgcgcagcctgcgcgtgctcaactgccaagggaagggcacggttagcggcaccctcataggtaagtgatggccccagacgctggtctctctccatctggacctggcctgggaggtggcttgggctgggcccagggagagctaatgtctcctaaccaagaatgctgtggcagcctctgccgcagagccagagaaccagagtgccaaggctggcagggttcccagtggccacgagtgcagatgaagaaacccaggccccaagagggtcatgcaggtagcccagggagttcagccttgaccctgggtcaatgacctttccacagttccacactgctccccttttaaaatccggtgatgtctttatgtcttttgttatgttatcttcaatgtggagggactcgaggtgatctaagcaaactttttctatcttctgcttgcatacctctgagaccaggggactcactcacttgcatgactgggccctgcaggtcacactggccaggcagatgtggtggaggaactggcagaggactttttctagactgtgactacatttagtccacccagcggcccccctatgaagtccagttgagaactaggactctgggggccggtggacagagaagagggagggttctctcccttactgacttccttctgtggccagacattgagcaaggcctctgtacagcatgtcctggggctggccttgccgtagctgctaaatagttgacgaaaccagtccagagaggggaggtgactgccagggtcgcacagctcaagctggggaactcgctgggaaaactgtcagctctgggcagcagcttgacttccactgtaagccccagcccccagggtcaaacactggctctggtgctggcagaggcagcccactagcctgtttcaaaggctgagaaggcccaggagtctgccctgtgctccaccagttctgccctgagactttcctacagagtacaggttttgatgttcagttttaaaggcaagaatcaataaccttctgccccatcaggtgaccccttgtgcctgtcccacccctttattgactgacctcggctcagtcaggtcagttcctgaaggtcagtgtgtggaggggaggctgttctttcccagaaaggccttccccaggcctggtgctctggcctctggaggacttcctggagaagtcccttctttggggtcccagtcagtgtatgggaagcccttattgcatgacctggcacggggcaggggctcaacagtcactattgccttccttgccactgccatttcctcctctgtaagcaggtgattgtgtgtccagtctgagcacagagataagcacacagcaggtgcttaataactagcagctgtaggctgggcgcggtggctcatgcctgtaatcccagcactttgggaggccgaggtgggcagatcacctgaggtcaggagttcgagaccagcctgttcaacatggtgaaaccccgtctctactaaaaatacaaaaattagccaggcatggtggtgggtgtctgtatcccagctacttgggaggctaaggcaggagaatcgcttgaacccaggaggtggaggttgcagtgagctgagatcgtgccactgcaatccagcctgagtgatagagcgagattccatctcaaaaataaataagtaaataactagcagctgtaaatgtggctgttgttcttcacctccacactcagtgccactccactccctccctccgtggtgtgaggggcctcactagctgtctcctaggaggagcatggctgtgagattccagctccatccttggccacggctcctggagacatcttagaggccaggatccagaaggctcccacacctcatttgacaggggagaagctgtcagttccaggtccccttgcacatcagggccagagctgcgttaggcctccagtctccaggccactgggccagagctcacaggctggcagagggttagaactgttactggtggctgggtgcagtggctcacgcctgtaatcttagcactttgggagggcaaggcgggaggatcatgaggtcaggacatcgagaccatccttgctaacacggtgaagccccgtctctactaaaactacaaaaaattagccgggcgtggtggcaggcgcctgtagtcccagctactcaggaggctgaggcaggagaatggcgtgaacccgggaggcggagcttgcagtgagccgagattgcgccactgcactccagcctgggcaatagagcgagactccgtctggaaagaaaaaaaaaaaaaagagctgttactgttgacagtagcatgaggtagaccatggcctgcaccaaaatgggggagtggagtgccactgaggccagaaggaaccacaccctcaagggtggggagttatggtatggggggtcctaggcatggagtcttttaattctttagacaatcctgggagcaactgtccctgtttcacagagggcggggccacacagctggtgagtgggcagccaagactctgttcaagtttgtgtgggtccaacacttgcggccacggtggaggggcatctgagccaggcctcagagagtggcgggggaagttgggtggggaagtgtgcccttctcattcctctgaggctcatcctcttggtgcctctctttcatggaaagggataataaggttattgtgaggatcccctgagttcgtatattcagacgcttagacagagccaggcacagagaagggcccggggttggctagtttgattgctggtgtaattgctaatatcttccagtttgtattggtcaaggttctgcagagaagcagaaccagtaggatgtatatattaagagtttcaagctcatgtgaccgtgcgggctggcaagtctgaaatccgcagggcaggccaggcaggctggcaattcctgcagaatttgatgttgcaatactgagtcctaaggcagtcctggggcagaattccttcttccctgggaggcctcagtctgttctcttaaggccttcaactgattaaatgaggcctgcccaagttatagagagtaacctgccttactccgtcttctgatttaaatgttagtcacatctaaaaaatattttcgcagcagcatttccactggcttttgaccaaacatcaggccacaaagttgatccccaaaattaaccatcactctgtgcctgtaagggaggggctgggaaaggggagcaggtctccccaaggggtgaccttggctttgttcctcccaggcctggagtttattcggaaaagccagctggtccagcctgtggggccactggtggtgctgctgcccctggcgggtgggtacagccgcgtcctcaacgccgcctgccagcgcctggcgagggctggggtcgtgctggtcaccgctgccggcaacttccgggacgatgcctgcctctactccccagcctcagctcccgaggtaggtgctggggctgctgccccaaggcgcgggtagggggcggagggcggagggcggagggagggcgggcgggcaggcgggcttcttgtggcacgtgggcttcttgtggcacgttcctggaggccgaacccttctggctttggaaggagtcgtcagagacccccgccatgcgggaggctggggaggaaggggctcgaaacctccatcatcgcagagtctgaatagcagtggccccgccatgcgcccacgtagcggcgcctacgtagccacgcccccacaccccgtcctggccactctccctcctgaaggtcttctggtacccgccccctccccatctccatccccaggccctgcgtcctctgcccaatactctttgggcctccctgttgtccagctctctccgcggctccatgactgacaacttgagcaaggctaatgtgaatgggagcggttgagggctcagacctctcacccgaggaacatccacagagtgtgccgcatgcccggtgcagtgtggctgcggggacacagacacggagcctcggccctgaggagctggggggcagtgaccgtccctcctctgacccaccactcctccagtgtcaggacactgcgggtatctaggggaaggaatcttgttccacttcaagtctggaacttcaagtctgtgtgtgtgcgtgcgcgcgcgcgcgttgggggtgggggttgcagagcagatgcgtacctgacagcggtaacctaggtcccccctggcctatcaaggcttccctggcggccgaatttaaaggcatcaagcaaacaaagcccaacacatctctgccttgtcctctcagtttccccccgtggcacttagaaccacttgatacaccgaatagtttcctatctcccccactaggatgtaaactccacaggggcattgggaatgctgcctggctatggtagggacagaggggagcaccagggcggggcaggggtgccagagttctgcctgggcagtcagattttccttaggaggggacatttgagtgggacccaaacaggtgtatagcagttgtccagcccagctggcaaggcctgagtctgcctctgcaacccctctcttgggctcctttctctgccacccacctcctcacctttccaggtcatcacagttggggccaccaatgcccaagaccagccggtgaccctggggactttggggaccaactttggccgctgtgtggacctctttgccccaggggaggacatcattggtgcctccagcgactgcagcacctgctttgtgtcacagagtgggacatcacaggctgctgcccacgtggctggtaagtcaccaccccactgcctcggccaccgtgatgctaacagcccctttggcagtcagggtctgtgccgggacctccagtgccaggctctgtgcagggggaccagagatgaagtaggcctgatggtgccttcaaggacactcagtctgatgagggaggcgagtgcacagaggaaacacgaggtcagggctgtattagagggagcccagaggaggcacctgcccagcccgagggtcagagaaggcatcttggaggagggacatttgatcgggagcttgatggatgaataggagttcacctggccgataagacagcaactaccaaggcttagaggtgtgagaggaggctgtcttacctcactgagtaaggactgcaggcggcttaccttcgagaagagagcttagtgtctgtgtgcacgtgtgtttgtgtgtatgtgtgtgcgtgtgtgcactggcaggagtcccctgctggggcaggagggccgggccatcaccatctttcaccattcacccctgcaccaggcattgcagccatgatgctgtctgccgagccggagctcaccctggccgagttgaggcagagactgatccacttctctgccaaagatgtcatcaatgaggcctggttccctgaggaccagcgggtactgacccccaacctggtggccgccctgccccccagcacccatggggcaggtaagcaggatggcagggtgggcaagtccaggctggggcttgggaggtctgtgtgaccttgacagtctctcccttctcccttgtctgtgtaaggaggatgacgccaccttaaataggattaaatgagaatggggctctgaaagggctgtgcaatattttcataacgtgtttttatagagacagttgagtatgttctttaagccctcctctctcctaccatgaactaaagatttctgtggaggtcccctcactcccagcaccccctcctcatcccaggccctttttgcaggttggcagctgttttgcaggactgtatggtcagcacactcggggcctacacggatggccacagccgtcgcccgctgcgccccagatgaggagctgctgagctgctccagtttctccaggagtgggaagcggcggggcgagcgcatggaggtgactgtacccctccttcgtgtgtgtgtgtgtgtgtgtgtgtgtgtgtgtgtgtgtgtgtgtgtgtgtgtcagtgctgggccctcagggacccccagcaagcccctccatcctccagactccagctcttctgtaagcttacagggctggccagaccaggagtggggcactcctcacttcacgcggctgggggctgctggagagagccacagcgggaagggtttcctagaggctgcaggacagtgctggatggattttcaatgctcacctgggtgtgagcgtgcggcagggccgcgtgagggtcagcgatctgctactctggactcagccatctctaggcccctctcactcaggtgctccatggttctgggagctgagaaatctcaaaccagcaaaaaagtggaattgatgttgatgctacaggatagtgcacagatgccatctggttgcagcattttggtggaagggcagtgcccagctaggagagtgaggaggggcaggcatttctggcttgaggagatggggtcttaatgctcgtgtgagaggcagagtgggtggagtggagctggctggatccttgctttggcctcctggatttctctctatctccattttgaaaccactctgtgtttggaagaacttttgagtattcagagctgcccactggcagaacagtcttccttgggcaggagtgagctccttgtccccagaaggctgggtctggctggcccctggcagggacactgatgagggtgcttgagttgatcctgtctagtccctttctgtgttttcaaagcccattctaaagcagattcccatttccgtctttgactctaaggcccaagggggcaagctggtctgccgggcccacaacgcttttgggggtgagggtgtctacgccattgccaggtgctgcctgctaccccaggccaactgcagcgtccacacagctccaccagctgaggccagcatggggacccgtgtccactgccaccaacagggccacgtcctcacaggtaggaggctgggcttgccctggggtgaggaggggtctctttctccttatgcacccactgcccgcgaggcttggtcctcacaagtgtgatccatgagactcaagcctgacttgcagttccatactctggttctgccacttccatgccctttgagcctgggcaggtgaccttacttctcctcatctcagcttcctcctccataagagggaaaaaggtattacctgcctcattgtgttgcaaggagatgggcagcatctagggcactggcctggagtatcgcaggtgctttgcctaaggtggtgcagtccaggagaggcagctccagagagaggcccccggctggggctgaaaggagggcagacctcggtttgaatttcaccctgccgctctatagctgtgtgacttgggcaaattacttaacatctctgtatgaggaaatgatgagtgctaagcacttagcttagtgccgggacaatataaattctagctatcgttactattgttttcatcacccgttgctttaaaatccagcctctggtataggcaactattgacgggctaccctgtgtcgaaaacatgcccaggcaggtagcaggaagtcacagatggggacctcttggggcatcaagggatggtgccctgaggctgagctgttctggttgggtggagcatgagaggtctgggaagacagtgggactccagcctggaataagaggctcagagttgattctcgtctgagcacgtccaggggaaccactgagggtttgggaacaggagagtgagggtgagaacctggttctgggcacagcaggctggcatgtaggatggatgttcaggaaagatgagcatagtcaggtggctggtgcccttgtccaggggagaggctccgtcaggttcaggggtcctggcttggagggaagtccgccatgctctaatcacgctcccctttggaagtgctcagccgatgagctcacaggcacatgtcagtttgaagtcatggaatctgactccatgaagcgcacctcaaagagcaccattttgcagctaagggaactgcaggctggacatgctgagtggctgccccgagcccttgcagctaggacatagagaatgctagtaaccacaaccctaccatgttcagagcacatgccaggctccatgctggggcttcgcacgtgtcatcttcacagtgtccctgtgagtaggtgtggtttctctttccatcttacaaatgagtaaacagagcctcagtgtagctaagtaaccactattttaggtttcttagccaatgggtgtgtctgactcctaagcccatggagggcattctgaggtggttcagacagaccccggcttacccttgaacttctgcctgctggctgcatagggaggggctggggggagtttgagcatctcaggccatagagcccctgcctcactgtctccatctctgggtggaaagatggtgttttccctgagaaactaaggctcagagaggttgaatggctctcccaaggtcacacagctggtcagctgcagagttgagaacacaggagtcctggtgctcaggccagcatctctttttttctttgagttgtttctaggtttcctagctcttgcctcagaccttaaagagagagggtctgatggggatgggcactggagacggagcatcccagcatttcacatctgagctggctttcctctgccccaggctgcagctcccactgggaggtggaggaccttggcacccacaagccgcctgtgctgaggccacgaggtcagcccaaccagtgcgtgggccacagggaggccagcatccacgcttcctgctgccatgccccaggtctggaatgcaaagtcaaggagcatggaatcccggcccctcaggagcaggtgaagaggcccgtgaggccgggtgggtggggtgctgcgtgtctctcctgcacagcttttctgtgtcagtttgtgccaccaccataccgccatgcatcagggtggcggtttgccaggtagatgctgtgggcagcttccgccattgtgtggacagcatgtatatgtgtctctgtgtggctgggtctgtttttgcttttgtccagatcagtaaggtttgctacctgggtaccccactccacttggagtagaatgtgcataaatatggcataaagaaatgcaatatgcatgcatttattgattgatctatttttttctgagatggggtcttgctgtgttgcccaggctggtctcaaattcctgggctcaagcaatcctctggtctcagcctccccaagtgttgggattataggcatgagccgctgcacctggcctctctgatctatttaacaaacctgctgggagggtctcagggtcaggagcagcactgggctctgaggacacagagctcactcagccgtgacccagagggggtgcctgagctgcatgctgaaggttgttagcatgaccagcaaggcaagaaaaggccctgccgagattagcaaggcatgtgccaagccctggaatgtgacagccgggccttctagaaacctgagtgtataactctccttaaaagccagtaggagctcctcaaaaggcagccctaaggagtccactcttaaatgaactcagagtcagttttaaaatgcaagtctgtgttgattctggtctggatggtgcattcctcgagagcaaaagacagtcttggtcttggatccacttgccctgggtacactgagggctgctaggttccaggtgctcttcctggcactggggagggatacaggcccaagagacatgctgttctccctcctggagcatctattttagtggaggaagacagaaaacaaaccattaatatagagtactgaaaagatgcgatggagaaaactatagcaaggaagggaatggggtgggagagaggtcaggagaggtctcgctgacaaggtggacgaaacaggccatgaggcagagaacatgttccaggcaaagcaaaggcccccaggtggggatgtgcagggagtaccaggaaaccagagaggtgggaatagttatgagatggggggtgcctcagaggggacagggccaagtcaggtgagacctgagggtcacagtcagcagtgagctggggccatgcaggggtctggcctcagaggagtgtggtctggcctggatctgaacctctcactgtggcctagctgctgagctgagaagagatgacaaggaccttgggcagaagcagggagactggagggaggcggtggagggtccaggcgttggggcggggctcaggctggagtctgaagggagcctgcaggcctggtgggtggatgtgggtgggagagggggaggatggcaccaaggctcgggcccctggacagatggagttgccattaagtgggatggggcaggctatggggccatcagtttcagagggatgagtttggcactggcatggtaggcatctgtctatctccacggccctcaaaccaggcatgaagcaggagctcacgtgtttggtcagccatggtgcagaaccgcctgggtgggaggtgcggggtgggagatacacggttgtgtcccaaatgggctctgagccagcgagggccgtctgcactttggcctcacagaaggatgtcggagggagaaatgaagtgtgggtgggggtcccgggccacgctagacatgtgctttcttttcctcgggctctggcaggtgaccgtggcctgcgaggagggctggaccctgactggctgcagtgccctccctgggacctcccacgtcctgggggcctacgccgtagacaacacgtgtgtagtcaggagccgggacgtcagcactacaggcagcaccagcgaaggggccgtgacagccgttgccatctgctgccggagccggcacctggcgcaggcctcccaggagctccagtgacagccccatcccaggatgggtgtctggggagggtcaagggctggggctgagctttaaaatggttccgacttgtccctctctcagccctccatggcctggcacgaggggatggggatgcttccgcctttccggggctgctggcctggcccttgagtggggcagcctccttgcctggaactcactcactctgggtgcctcctccccaggtggaggtgccaggaagctccctccctcactgtggggcatttcaccattcaaacaggtcgagctgtgctcgggtgctgccagctgctcccaatgtgccgatgtccgtgggcagaatgacttttattgagctcttgttccgtgccaggcattcaatcctcaggtctccaccaaggaggcaggattcttcccatggataggggagggggcggtaggggctgcagggacaaacatcgttggggggtgagtgtgaaaggtgctgatggccctcatctccagctaactgtggagaagcccctgggggctccctgattaatggaggcttagctttctggatggcatctagccagaggctggagacaggtgcgcccctggtggtcacaggctgtgccttggtttcctgagccacctttactctgctctatgccaggctgtgctagcaacacccaaaggtggcctgcggggagccatcacctaggactgactcggcagtgtgcagtggtgcatgcactgtctcagccaacccgctccactacccggcagggtacacattcgcacccctacttcacagaggaagaaacctggaaccagagggggcgtgcctgccaagctcacacagcaggaactgagccagaaacgcagattgggctggctctgaagccaagcctcttcttacttcacccggctgggctcctcatttttacgggtaacagtgaggctgggaaggggaacacagaccaggaagctcggtgagtgatggcagaacgatgcctgcaggcatggaactttttccgttatcacccaggcctgattcactggcctggcggagatgcttctaaggcatggtcgggggagagggccaacaactgtccctccttgagcaccagccccacccaagcaagcagacatttatcttttgggtctgtcctctctgttgcctttttacagccaacttttctagacctgttttgcttttgtaacttgaagatatttattctgggttttgtagcatttttattaatatggtgactttttaaaataaaaacaaacaaacgttgtcctaactcttgcatagacttgactgcctagggtgatgccttgcttatactaggaactgggtaagtttgttgaatagttgagtaagccaagtatttgatgagtacttttatcttgagtacaagtattgggcaagtactggtgatgtgaacttactccttgtgcctatcctaggaatgaaatgaatgtcttcctgcagctcccctgaccaccctgacagtcaaagtgcctcctccttggtgacaggtgccctacagcactctagatgctctgttgtcctgacctcccaatgcccttttcattcttttctccccagtacctggcacacagcctggcccgagtatttacggaataagttacagtgccagatgcttctgtaatgagccagtgctaagtccatggcttttttcatgatttaaaattcagaacagtctcagattgggtgcaatggctcacacctgtaatctcagtactttgggaggctgaggcaggaggattgcttgtgtttaggaattcaagaccctgggcaacagtgagaccccgtctctataaaaaaatttaaaagattagcgaggtgtggtagcacatgcctgtggtcccggctactcaggaggctgatatgggaggcttgcttgagctgggaggctgagggtgcagtgagctgtaattacatcatcactgcactgcagcctgggttacagagtgcataatgatcccattcaatgtgggacctccaggccctccactctaaggctggtgaatatagctgtcttaagcaagttctctctctctctagacagcccatgtcataaggaatctcaggcaaaattcctcccagattacattttctgacaattcagtgtcatatatggaaagcattcaagagttgacagatggcaatggcttgaacacccaactgtgttatctctgcccgttggaacctaggcctgtggtgcaaccctagactctctctccttcccctccacagaatcaagtatcagctggttagagatccacaccctgacagctctgtgatgttggaacaacttggttcttgcagagggttagcaggtggtcaccagggatcggggaggaaggggtgtggcttgcaggaaggcgaaaatctggactagcaaatagggaaggggacccatgtgagcaacgctggccactaggaatgagactgagacctgtgggatctagcaagaagcccagtgtgaccagcgacacgatctatgctggggaccacttgggagagccaaaagctttggtggagatgaatggagaccatcaacctaagttcagcatcctcctctaagctttgcagatgaatcctgaaatggtcagcccctccagagaaaagaacagcaacaggctcagaggacccacagtcccctttattagtgtaaagtactaagaggaatcaacagcatttagcaccaggcacaggctcgtgttcccccgcccactacggctgtgttctgatatatgaagaatggcggcaagact

SEQ ID NO: 460 - DNA, 585069 bp, Homo sapiens
  source 1..585069: mol_type = genomic DNA
actaatcctaactgtagttcagaaaaagagattccattatcatcattttacagatgaaaactgtgagaacaatgactacattgcggattttgttggcttcctttcaggtgcttattgcctcactattattaattttggctttgggctcaatttcaaggttatggatgaggtagatggtatagtgtaagcaacaggtccaaaaaggcagaataaccagcgaacacttggtagcatctcagatgtggggaaataggtgttttatactccaaacgctagtgtttgaatatgtttcctccaaaaccatgaaggggaaagttcattaagttcctacactgataagctcttagacatgcctttcaatgtacaggcatgtaaagctattttgggtgaatgggtgaatagtaggttattaggttattgcccttctttgggaggtccctatttgtcctttaatacacagttcagatgggatttaaattccctgacctgttccttctcttacatagaaaaaattgcttccacttatgcaattggcatgtgcttctgttgtgaaatacttgtgttgtttgtctcgggctttcatagttggttctcctattaggcagtgagctccttgggtgcagagactatgtcctaatcgactctgcatccttagcttctgcaaagtgctcagtgcacagtaggtgtgcatgatgtttattggaataaatcgagaaacaggcgaatgttgtctattaaagtcattttggtctctagctactgtagtagttggataggcaaagttacttcatgcctatcttcctcctcttttccttgccagcttccttctttttttctctgactgaaagggctggacaaccggggaaaaggaaacttgtgctttccagcatacctctcccactctacacacacacacacacacactctctctctctctctctctctctctctctcgctctcgctctcgctctctctccatcctgttgcatttttaaagcaggctcagtcaggttactgagtgcctgttgctccatcacacgaattcccaagttgtgggactcaccttcaggggtgtcttggtggagcacctcttgggaggtgatctgacctgttggttcaggagcactgcgcgtattcactctggcgctcctttgtgcaacaggagaccagaggactcccacggtcccactggctccttccacgtaatgtgccccgctggctctctcgcctcccccaacccgggggtctgcgtcccctgcgccccagtccctctttgtgcagccagtagctgcagagctcttcgtcttgtattcatggcagatgcacagcgagtgactgacacgttccagggacggcgaatgggaaagagcgcgggcggccgggggagggtgtgtagtggcagacggccgctgggattatgaatgggggctggggggccggcgagtgtggggttcaaaccaggattttcggtctctggctttggataggcacgcagggctgtgcgtaatccttcagctctggtggtaagggagatgcagtgagctcccggctgggagagagggttattttgcaaaactcccctggtaccgtgcccgcggaatattgcaggaggtctgtgaggtaggtgggggaaaaaataacctgggagggcaatcagggagaggccagacgactggggacggcgtgctttgcaccctagaattgacaggtggtggcctcagcagttacaacctactacacagcatctcgtccgtgcgatacggtcacattgttattccccgcacccggctgaggagcgcagcgcggcagaccaagtggcaccggcgagctgtctctcttccggggggcgggggtggacagtagggagagggggtttaaagggccagaggacgagagaagagctgaggggcgcgtcgccagcgcctgtgtctccctggcgcgggttccccaggctagcccgctggcccgtccgcgcgcgcgcccccggcccgcgcgccccttcccggggctcctggcctcgcctcagcggctgcaggctcttcgtcgcgggccgggctgcacgcgagcgccctccgggcagactttcgtcccccacccccgggagcgcggaaggctcactcgcagcgcatggtctacccgcgccgggcggagccccggcgtccagagcgctgcggccgcggcggtgcagcagaggcgcctcgggcaggaggagggcggcttctgcgagggcagcctgaggtaagggctgcctaggaggctgcgggtttatttttcctcattctcttacttcatcacacactgaagcctcaatggagagtgtagggtgctgtggggctgatgtggggcaaagagggaatggggccgccgggcctggatggtcgtcttgacggcgtcattgtcgccccttgtaggaaatccgccaaccggcccctagcctttcgccctcatcttctctgcttcggcttccgcccttggacctcttgacaagtcactggggaggagaggatggagagaggctaagggagaatggagagaggcagaaggattcagggcttggaagccctggagtaggtgacggatgggcgcgcggtgcccagtgattgactgcaggcagcgggcgcggaagggaacctgaactacccaagagtttgctgggctgaggctccaggatgctcctgcgtgccctggtggctggggcaccaaggaggggcgcactcaagcctcggcatcaccaaggctctgccaggaacttttgggaagatttgtctggtgtttggtgagggggcttggacctttctagctacaagagtgtgttggggaaggaagaggctctcctcctttctcctgtcactttccttcatgcctactctcttcttccatcttcctgttttgcctccttccttcccgtttttcacaggccaccttccttgtgcggtacttcaaacacaaatcggaacccactatggccaacagctttaaagcgtgtataaggaggagcgcacagaagaatcgctcttaattacagtagttatatatgtgtgtgtgtgtgtctgtgtgtgtcacacacgtgcctgggataatttttagcaagactttgagacggtcacctaaaattacattgtacttacattaggtttacatcataattatatgatgccactgaacagaaatggtaactctatgcattctgcatcttagatctgagatataactgttctttgaatcacatgcatcgtttaatttcaaagatttccagctgctggaaaactcttggctaagttataagaatgaaaggcacattaagcataaaaaaagtaataaatgtccagatactatttttattagtagatcatactccccctccgtttccttttgccaaaagctgttattataccaattatattcataaaaacgaaacaaatttggagatttcagtgtttttacctacaacctgaagtgtaggtaggggtctagaatttatctgtacatgaattcacaagaagatagataaggccaatgatttcactgcaggtaaaggaagttgagcttcttctctctcaggatacctcatttcttggtatcccaagagagaaatccccttaatgtcaataaatatagcattggtctcttcagctcttcaaatcaatacttgtaggacttgactgtaatatgtttgctggctgtttctattctttttcattttctaaacaacaacgtgccaattttgttaatttacaaaaaataagtaagattgttaaatggactggaatttatgagatggcatgatcgatgcattgaggctgtttatctatatatctatcatctttctatttttcttgttacagttgggagctaaacaatgttgcagtgtgtctacttgtatttttatcagctgatttgcttttcagtttctttatggcttgacatattttgcaaaaatgaattgtcttaaatttctctagagagtaacctgttagacatactgtttgctttcaaaataggactgttttttgatttgaggaataagaaatcaatcatacatggttttctgatcttggagtcctttgcctgtctagagacaggtatttaagtatttaacagtaatagttactgtgtatgtacaaataaaggcttgtttgataaagatactggacacagaaataataattccattttggtttacaaatgcaatatttaaaattgtgaagaaataaagagttctaggttactcctaatatcttacttgacttaatttggctaaggagcaagaggtatatgaagaggtcttcagttagaaagatttggtggttagtaatttattatcatgtcatacaatttcacccatttctatttccaaaaaccttcaaacagcatagtttggacaaggtttaggatgttgctgaccacaaaacaaatgagttccttcaggcactggctattgtagccaccatgtggtaatacagtggacactgtgatgtgccaaatcgttcttcaaggagggacttgttgccccagcttctgggagtgtggtcaacagatggccttcaatagtcagactcttcagggattgcctgagctgtagaaagctcccttgtccaaggtcacacccctttccagcgcagctcacatccaatggctgatccatgtgggagtataaaggttgggccattgcagcacaactctggaaaactctgaaggatctttctagctctggagctccctgagggcttgcattgcagctctacttctctctttggtcctttctgtttccttccccatccttcctcaggtgtggataacaaggcggttcccaagaaaatagggctttgaacttcatttcagaattagcttgccagggaaacccacctgtgactatgttcttaccccatacattcattttgccagttttaatccattggtcttttgaaatgtggtgtttcaaccatcaaatatgatatagaagatgcatatgtggaaggaatttatagttgacagtttctttttcttccagcacttgaaaaatgttatgtcacttcatttcaggcctccctggtttcaatgagaaatttgttgttgtttgaattgacgttcccttatacacaatgcgtcatttctctctggagagtttcaagaatattttctatatcttcattttttggaagtttgattatgatgtgttttggcatgaatttcttttggtttgctctgtttgggatttgatgaagtttttaaaatgtaggtttgtctttcaccaagttgggagattcttaggcattatttcttcaaacacaaaagtgtttcagccccactctctttcttatctgcttctgtgactctgatgatatgaaagttggatcttttgttgttgtcctacaagaccccgaggcttggttcatcatttttttttctggtattttctctttgttcaaatagaaaacattcattggtctgttttcaagttcgctgattctgtcctctgtcttctctactacagagcccatctagtattttattttgattactatatttttcaactcaataatttccatttggttctttttgcagcttatgcttatttgctgagacattctattttttcattagtttctagagaatttgtatttgcttgctgaaactttttttttttttttttttttgagacagagtctcactctgtcacccaggctggagtgcagtggcatgatcttggctctctgcaaactctgcctcctgagttcaagcgattctcctgccttagcttcctgagtacctgggactataggtgcgtgccaccatgcccaggtaattttttgtatttttagtggagaagcggtttcaccattttggctaggatggtcccgatctcctgacctcatgatctgcctgcctcagcctcccaaagtgctgggattacaggcttgagccaccgtgtctagcctgaaacatttttttttttttttgagatggagtctcgctctgttgcctaggctggaatgcagtggcactatttccactcactgcaagctccacctcccaggttcacgccattctctggcctcagccttctgagtggctgggattacaggtgcccgccaccacgcctggctaatttttttgtattttttagtagagacggggtttcaccatgttagccaggatggtctcgatcttctgacctcgtgatccacctgcctcggcctcccaaagtgctgggattacaggtgtgagccactgcgcccggccaacatttttagaataaatgctttgtaatctttgtcagataattccaacatctgattcacttaattgttggtgtcacttgattgtcttttctcattcaagttgtggtcatattttggacattttagctattgtgttagaaggctctgggtttctatttaaatcttgtattttaacagataatcactctgtttagggtaacacacagatcctggcctacttttgtgggcagtggtttcaatgacaatttaatttctagaggctttgaggtgctgttagtctgcctggtttgtctggtgcttccggggctcccactgaacgctgctggtgccacctgaaggggaagaagaagcctccccaggccaggccctgttgtgcctctaggttagagaagtgtctctaagtgactttcagccttgcagaaataaggagcattcttagacctggaacttgtggcaggattcctggtgccagtgctctgaggccacctagtattgtcaaatggaccccagttagatgcagacaaggaatgagcctacctagatcatttcctactactaggttaggagtcgggagactctgggcctgggtaatctgctgttgaatagagagttggaagacatccactgctctattgctctactgttcctccagcctagaggtcactaagcagtccatttccctcttgccaccattctcagtcctccttgggatgccccttgcattatttttattttttaattttaaaaatgtttaaaaatttatttatttatttatttattttttgagatggagtttcgctctgtcacccaggctggagtgcagtggtgcatctcggctcactccaacctctgcctctcgggttcaagcaattcttctgcctcagcctcccaagtagctgggattacaggtgtgtaacaccatacctggctaatttttgtattttttttagtagagatggggtttcaccatgttggccaggctagtctttttttttttttttttttttttttttttttgagacggagtctcgctctgtcgcccaggtcggactgcggactgcagtggcgcaatctcggctcactgcaagctccgcttcccgggttcacgccattctcctgcctcagcctcccgagtagctgggactacaggcgcccgccaccgcgcccggctaattttttgtatttttagtagagacggggtttcaccttgttagccaggatggtctcgatctcctgacctcgtgatccacccgcctcggcctcccaaagtgctgggattacaggcgtgagccaccgcgcccggccgtgccaggctagtcttgaactcctgacctcaagtgatccacctgtcttggcttcccaaagtgctgggattacaggcgtaagccactgcacccggctttttaaaaacactctagtttaaatcctcaaccacattatccattactatcattgaaaatactagtttgattgtatttccctgtaatatatatctgttaggtgtggagacatagtttaaaccttagttcaagatagcttatttaaattaagttaattaatattactgtaattacagaattaaatgtcaaatcataccctgtctgtagagtctaagacaaaaatcttggtatgtgacgtttactctatggaacatttttttttcaagttatcttaatgcatttgaaaaatattagtacttcttatttattgccatctttgtgggaaaggctaaaaaatcctttatcctgtggacactttaaccttagagaaagtaaatgacattatttccataagcaacttgctgatattttgaatggattaaggagcagataccaggattctgtctttggctctcctagtatatcacagtgctgactcatagaattatggcattttcagaactgaaagtgatcttagagatcacctatttcaaccttattgttttatattttagaaaactgacatgttaaaaagccataaggaaatctaagttccttcagttcagtgatggcagggcttgtttattctgagttcttagaatttcctaatttgatattttctttaagaaatcagaattgccttcctttgagaaggcttattaaaaatttattttgaggtataatctctcagtaccccttttttaacaagaaaaactacttcaataagttgggaggacatgatttttttaaataaaaataggcttgtttgaaaatctgagggacatatggattaattatccagaaaaatgaacatatagtcaaaaatttgcattcaatattaagtatttatggattcctaggaaagacctccagatactgttttgtgttatactcatgcactaactgtggattgtctttgttggggaaagtgatagggataatgacttattttatagtctgggtcagccttaaaggcctgtggatggtgacagttgtcctgggcatgctacattggtatactgcaggatttgtctccctgcagattctagagtggcagtaggtgagaaggatgtagcaggaccagcaggtgttcaaacagactgactgtgcgaaatacaaacagggaactcagcccacagtgcttgctctctcctcccccataacacacacacatacacttacaacatatattaagattccttagaaagattctccatctgtttctttctgctctcaccttcttactatatggagaaacagtgtccttttgagatcattctttttctgataagattgctttagtggtcatttaaaaccaatttcacctatatcaaatgttaagggctgaaaaaagaaagattaaagcagcatctgctgtatatactggggggatttttctaagggtaaaaacaaaagcacatccatgttttccttatatcatggattaaaaaaaattaaaaccatagaatgataatgactgaattcagagatcaggaggcaaggccagtattgaaattacttttaagcagactgcctatatatacttaaaggaagctcctatatacacttctgtgactagtacaactccctggatgagaaataagactgaattgttttgcagtgtcatgatgtgtaccagagtgaaaaactcaatgcagaaaaatgggaatgttgtacaaaaagatataacagaatgaggcagtttttttctagttaatttccctagaaagcactttgtaggacttctatttgcaaggttacactttagtaactgaataagtgaggactgggaattggaagtcctgagttccagtgctgctatgcaatttattgggtcagtgacatcctgtgtgtaagcctaagggtataaaataaggccagcttatgataatctctaaagttctttccagcattatcatttggtgaaacttcagattagtggatattgttcgacaaaacatttgaaacaatttgtggtaggcccatgcaattaagtattatccataagaaagatctccaggaagttaatatttgaatttgaaagtagtataatatcttgatatggtcagaatttgcaatagtaagagtggtcacggttgggctaagactatccaactatatgggtatagcacatagcacaatttggggaacaaacattttgctgaaatgataatgacaacggtcatgatgcaaatatggatggcactagatttaactggacggaaggtgtggtagatactgcagattggctgaatatcaattcatcccctttctctctcatcttcctctgctatacaagttggaaagcaaaacattcaattttccagcctcccttgaaggtagcaatggcccctatgacaaagattagatgaaagcttctggggagcacttcccttctcgaacaaagcttcttaaaacgaagtctgtttcccctgtctcttaccccttcttactccatagagcatggatgatcctgtgagtggccatcttgcaaggatgaggaataaatccataggcttaggatgatgaagtggcaaaacagatgtagcttggatcctcggtggcattttcaagatgtatcagccctgcactgcctacctccaggcttactattccatgagaaaaatataaaccccttaattgtttcttccactattttgttagattatttgttacttccagcaaaatacttttccaactgaatacatgaagtaatttttaagacctcacattttacatttttgaaggataaaattagtgtctacagatctatgtaattactgaccttggatatgaaacttagggtactttgtaccaatactttcattttgaagaagtttgggtgtgaaaattttggataatttgtataattttcatcttatttttcattgcatgaagaatagcatgagacttcaagagtctctgttttgcattgcttagagaatagttcaaattttattcaatgggtaaaatttatattaagaaaactctttctgtgagtcatacctcctacttagccataatcttcggtaagatagggatacagctgaagaataccaatgagtcttgaaaataattgttttccccatttggattataggcaaaatgtatagcaaagtgggtttccctctttactatttaatgtgagtttgtttccaccaaatttcttctgacttcacactgtcacaaactgagaaatactttaaaaggaggagtgtaaaggtgaaagaaggttggaatttgcagtacatggatataaaagatggaaaataattttgtgcatatgacaaggaatctacagactctccatttggatttgtctgacttagtgcagggaattaatttttgctttaagccgtgtgataagagaaaaagaaggattcaattgggatatgttgataatattatagcagttaagattgcattcatttgggagtaaccaataatttgacatacaatgctacaaccagcaagaagtttattttttttatacaacataaagtgtcagcaggaagatagttcttaataaccgaggaaactatgaaggaattgggctccttcctgcttttgactccactgtaattagtgtctcctggttgaaagtgtcaccagttttctcctggtgaaaagacagttaataaagcttccaggcatgacatctgtaccacaggcaggtagaggtggccaggcacaaggcacacagcagctgagtccgtcctttttaataaggaaaatattagcttcctgggaagttgcatctggtagacttctaatatcttatgcaccagaactatgtcaatggccatacctaagtacaaggaattatgagaaatagtttgtttgtgttttaattgttgtctggaaaaattggtacctcccccaaaatgtcaggattctgttatataatgaaaaaagggaaaatagatatggggtaggaaaccactattgtcattgcatatgaaaatattttacagcttttaaaatatttgcggtgttgtctcataaatttgtaatctggagatttcttaagatatgatagtttaaaatggttataaatttttatttgcctcattatctaatttttttaatcagttgtcattgtgtcaagagagctgactgatatatgaaactgagtgatagtattgctattaagggaattataagcaaaaaagtcacaatttccttctacattaatgatgacatatataagtgtgaaattctgagaaatcagatagtgacactattgtgtactattatgtattatttatttataaaatgtatttgtgtactatttatttataaaatgttatgcttttttgttttccctaaatttttaatgacatatattaatattatccaagagcaaatatattttttaaaagaataaaataaacttggcttaatctcagcatttctactttgctatactcattcaagatattgacaaaaatatccttcataattgaaggtttattctccaattgatgtaggcactctacttagaagctgtttatccacatcaaggctaatggatttctttttctagttagttttttcacattaaaatagggagaggcaactgttctcaccacacatcaaaaggatgttataaagacaaatgaaataatggatgtgaagtgcattattcgctctaaaaggtgttatataaattctataaatagtattattaatgtgtaaagaagatgatgggtgatcatttccaaaagtgagtatcataaccaggaattttgagtgtggtcttcaatacaagtttttcaaagagaacaataaaaacaacatattcttaagttcttgcattgaaatatcactggtaaacctcactgtgaggggaagagaatgtacagaaagggcttcaaagccaggcaatttcttgaataatgcaacatagtaatagattttgcccagatataaaaagtcctttgggtctcttaaatggtttgtgagatgggaaaactcggattaaaatgtacgattccagtgctggaaatagaatcttaaatctagaatggaacttccaatgccatatcttggaaacaatgaggttctgctttactaaaaaaatcttcaataaaggcttttgtaatactgtcagtaaaggtttttgtcagccctttggacgccagcttttatttcttgaaaagtaaattttaaataggaagttgttccttatttctaaccatggcaaatgtcatgctttctatgtgctggtcactagggaaaatgaattgtatgatatgctgataatgcttgactttgagccagggagcaaggcttgtgtcttagttttgtcactaacttaattgtgtaactgggaaaattattcaattgtttcatgtaaagaaacagtctttaaactacatcattttcctctttaggctttttaggcatgcttaggggacttgtctaatggagatcgtaggggaaagtcacacctctgtgggaaaaatactgggtctctttcatgtcaaatttatggtgatgagtgtttacatgaaattgtcatgtgaaaagtgatctggaaataagtacaaggaaggaagctttgcttttctctgtgctttatgctcttgcttgatttgttgaagatcaatgctaatgtgtggggttccaagtggtgtatgctaaagagacagtagctaagaaggaacaaaggtggttagttaaggagagcacgtcatactttgtaaatcagattgtcaacattattttatctctttttgctttaccccaagtcattagaaagtcttgtttaattgtcttggctgtcttatgaaaattaagagggaggttaaattcaggcaagtgttttggacaggaagtagttccccttggcctaaagcactgtggtagtagcagtagcagcaataattagagagtagggaattcttaagagaagataggggagaaatgaagaggggaataggggaattgtggctgccaaacaccactagaggtccagctgtcattttccaaatggataattttcttccactgtgcatgacagaaatatatttcttggtcatgtaatgatactgagctattccaggtgggctgggaggaggaagtgggagctctctgacctgctgtttcaggtgagtcatgtcgtggctgctctgcttcttgtagtcacccagggaccttagagtagaggtgcttatttttaaaaattccttaattaatagactttattattaattttaattgatacacaatatgttaacatatttaaggggcacatctttttttttgggggggtgggtggggggtgggaggactgaatctcactctgtcttccaggctggggtgcagtggtacgatctcggctcactgcaacctctgcctccagggttcaagtgattctccagcctcagcctcccgagtagctgggattacaggcgtgcaccaccaagcctggataagttttatatttttagtagaaatggggttttgccatgttggccaggctggtctcgaactcctgaactcaggtgatctacccaccttggcctcccaaagtgctgggattacaggcgtgagccactgctcctggccaggggcatgtctcttttcagtacatggatttcaaagatgtcatgaccaactccattctgacagagcatggtggagaaagagtgggtgaatattatggtgtcctggaagaggcacacatcctttatatttatattattgtttagaactcagtcttatggccaaacctaattgaaagagagactgggatattttatctaagctgtgtgtctaaagaaaagaaagcagatatttttgtggatagctaatagtatctgcagtacaatcattgtgcagcttttttttttaaacctctttcctacagcagattccttgtttcctgatttttatatcttcctgtttcttggtttaatcttttgtattgataggtggagcatatcttccaatatcttcctaaggaagagtatttaaaggtagaacttttgaaatgttttacatctggaaatgtttttcttctattttacaccttgtggatgtagaattctaggaagccattttactcagaattttgaaggcatatttccatgtctgttggctgtcattttagccattaagaagtttgatgctattttgaatcttgatcctttaaatgtgaagtctttttctcatttgaagctttttaacatcatctcattctccttgaaaattttgaaatttcaagattatgtacctgggtgcaggtcatttctaattttggtgggggagctcagtgggtcttttctttctggatactgtactcttctttagttctggaagtttttcttctattatcaattttattaattctgaagtcaattttcccccattatttaacatctcagatcaacatgcacctttaatcgatggtgtcttataaaagccagatgtcaatcatgagttggttgtgtaaaaaacattctattgacaccttctgacatgactttgaaacaagtgctaacattagcactatattagtgctaaattatttcatttggttttcttggttctgttttctagaatttctattacttcttagtgatacataaaataatgcttgtttttgattgtaaggtacacaattattttatgtatgactaagaaaaaatactagcaatgaaactgtaaacagtgttttctaatcacttacacaattaattttatttttattgaaagaacatgcttacacttaaatataaaatatatgatatatttctcccatgaatgcataacaaaagaacacatactaaaatagcttagatgagttattctaaaaactgattcactttcagagttttaaattcacatttgaatccgtctcttcagaatcctgagtcactaatatctgtgtttatccatgcagttccactttatgtaccatcagtagagctggtcctgaaaagatgcttagcaattatgttgatcgagcttgccttgtgattcctgctttggggatgttgttaaacatgcttgattccccactgatcctatctcttcattacaggtatatgatttctagatgttaaaggatgctccattattgtttcttagatttccttgtgaccaaactctcattactgctatctctctgacggcagttgtaaaatactgtcaattgtagggcatatcctgatttcagggctgtaattggaaaatatacatggtatttagatgctgagccatcaggattaatcctctaaaaatttcttatcttttaaaaacaaattttctttcacatattacatattgttctgtgtatagttactcttctactgtgtaccttaattgcaaggtaaagagaaacttgaattttcttaaagtgaaacagaaatggcaagaatccctggggtccttttacctctaacagcagcacatctgctagaaaactcacctgacctgggagatgatcaaatcataaagagaaccacatttgtgattcaggcacccctttgcaggtacctcagagaatcatgtctagaagcagtgggaaacatttctccagctgtccctctgcatagattcacagattcacaattatattatacacatcgttctataactgcatgtattcactcaaaattgagtaaaaaaatcgatttctcgcatcattatgaagggctgtattgtattctattgaataagtgtactatgctttattgaatccattctctaatgatgaatattcaaatcactttcattttaattattggaatttaccaatgctttaataagtatcccagtataaatgtttggaattgctgagttaagggctatacacaatttaaaggctttttgacataaacttttcttccagaaagtgtataccaatgtatggtttcaccaactgtcgattgtagtgctagtttcctcctatccctctaatcccatttcctcatatccctctaattctcgattttgtcaagtcattggtcaatgtgaggagagaaaaacggtctcttggctattttcaattggttttctttaattactcatgagcctaacgaacttttcaatgtgatgtggtgtcctctgagagagaaagcagctgcccaagtagggttggagtgggcagggcagctggagtggccccttggttggtgtcagtagaaggtatctgtcaggaaaggagtagttactgctttggagacctggaaggtttggagaactctgtgatttaagccctttagccttcatggagatcctttttgttaccttcccaaagtagctggatgcctttcaggttccacagttattgttactttgaccatagtgtctgcgtgaatacagagcatcgacctctagactgtataatcctcatctagtcccagagacaggatggcctaggggcaataagtaggtgaagtgtaagtagggctttgagtcagtgaggattaaagggagtgttgggtccatcaagtaggtagacaaacacttttttttttttttttttttgaagcagactcttgatctgatgcccaggctggagtgaagtagtacaattctagctcactataaccttcaactcctgggctcaagtgaccctcctgcctcaacctcccaagtagctagcactacaggcatgcaccaccacacctggctaatttaaagaaattgtagagacagggtcttgctacgttgcccaggctggtcttgaacttctggtctcaagcaattctcctgcctcagcttcccaaagtgctgagattacaggcatgagccattatcctcagctggaagagcataaatgtttgaaggcagacagtataaggcatagtgagggaatagtaagtctagacaattttccacataggtgaggaatgggaggacgtgtttgaaaggtgggctgagatcacactgtgaactttgagcatatgaaagtgagttttaggagggggatctttatcttaatggcagtgggggccctctgaaatttttggaattctgatgtggtgggacctgacaagtgtcatgtagtaggaaatttaatagcattggaaagcattggaaatgaatgtgggtagtacaaaaggtttctatgtgtatcctgtacttggtaaagggtagaaccttttcagttatggctgatttgtgtttagagggacatataatcagttgaatgcttctagtacatgattgttgttattttctatttctcagaaaaagacaacttaagagtagctcattttttggacacacagatcaggcttttacaatatgtttaggttttaacagaataacagaaagtggaattgttttttgaacatgttatgtggtgtgtgggtagatatttagtctttagaaatgcaaaatgggctgggcgtggtagctcatgcctgtaatcccagcactttgggatgctgaggcgggtggatcacttgaggtcaggagttcgaaaccagcctggtcaacatgatgaaaccccgtctctactaaaaatacaaaaattagctgggcatggtggcacgggcctgtaatcccagctacttgggaggcttaagcaggagaattgtttgaacctgggaggcagaggttgcagtgaactgagattgcaccactgcaatctagcctgggtgacagagtgagactccatctcacaaaaaaaaaaaaaaaaaaaaaaaaaaaaaattgcaaaacgaattcagaagatgcatcaaaaacaacctatagaattgccatgagatcgtcagctttgccaaatgacagcaaacatataatttcaaatggaaaatacactcattaagccatttagactagtgaagttatatgtgttatattttatattccatttgtatatggactcatttttcatattgaaatattagcataaatgaggagatctaaacactgccttcatttgattgggaaattatcttaagtacatgatataggatatttaaagaggctttagcattcatagcttggaattggatagtttatggttattttcttatttttgttgaaatttaaactgcactttctgaaatagcatttattatactttcagatatcatctgtcttgactaggaagtcagtcactgaatgagtaattttgtttctggtattactgcctgacaaactgattttcagagatggtcataaaagcagcattaatgatcatttttagagatagaatgacaaatatcttgataaatcatgccttgtgcttaacttatttatgaatagtttctgctgtggatctttttggtgctcttaaaatgcagttaaatttgtagttcaagaattgaatttttattcttccagtaattgcagccaagggctgcactctctttcagcctagataagccacagtgacattcctaggccaaaagaaggatgcttgttgaaagctggtgggcagtgaaaaggacaggcagtgtatagcttccctttcaaatgcagaaacagggcttctccaaggtggagtgttgataaattatgggatattccaaaagtccttagtccacactttctgctctagcaaaggtaatttttgctatttattttgacctaagtacctttataaagattttgttttttcctctggaggaaggtaactaatatttattgagcactcaccatgtgccaagcatcttaggaaatgctttaaatgcagtctcatttaattcctactattaccttgtgatgaaagcattattatactaattttgaggatgaaaacattaagcctcagccaagtaatttgcttaagtttatatagcgagggctgacttgttttttttctttcaccaacccaaagtctatactttttctagtgcctgcttaagactcagtatgttaaaactttaaaaatatttattgagagtttcagtatgttccaggtatataacttagatatatttattttcattttaaagatgaagaaatggagaggttcagattaatacttttttcagcattacacagagccaggattcaaacttaggtctatctgactccaaagcctatgctcttacctaccacattgacttgtaagactttttcttaaagggttatattttaaaattattattaatatttacaattattttctatttaattcttttcttaagtacataaatgccataagtgctacccccttttcatgcaaatatagtgagttaatgtggaggatctactactaaatgcctttaggattctgctaaacgcttcgaatacgttagggtttctcaaccccagtgcaattgatactttgggccagatgattccctgtttgggagacagcctgtctcgtgcattgcagggtgtttaacagcatccctggcctctaccaactagatgcaaacaacactctcttttccccctacccagttgtgacaaccaaaaatgcttcagacattatcaaatatcttttgtcagagaggaaatcacctgaagttgaaaactaatggtctacattatctcatcttatccttagaacaccccatgaggctcatatcattatgatctcagctttacacaataagaataacttgctcagggtcatatgctgagaaatagtatcttcagggctcaaattgaaggcttacctatgactttggactaatttttgttgtatttcatggactacgtcttgtcttcaaacttaacttgagcatcctcaaggcttggctatgtcagattctcctttttcttttgccccaagggcacctagaaaagtacttaatacccagctgtgctttgacagatgttcattaagcaaatgacccattttatgtgggtcatatttaaataagcatattttaaataaaatagagctgagtgcagtaattaagaatcagacacatcacaggtttacatctcattcctgccatttattagttataggatcatggaaaaatttttgacctatttgatttcctcatttgtttgtgactaataatccctcctgtggataatgtgaggagtgagttaacatataaagtcatctagcatagtacaagacacaaggttacaaagttaagtacatgatagctactagtaatacaaataatattaatattaatgatagtaaggtggcttggattttctctttatattatgacataatttacatatacttttatttcaataaatttagaaaaaaatttcttgtctgcctaagacaacttgaaagctgctgtttcattaacgttaaataaaaattacatgaaatataaaatatacagaaggtaaatgaggaaattagggggaaaaagtaaagccaaacaaacaaaccaaaaaaaaccccaggaccattaaaagacaaaattaacatattgtagtactgaggtttcagtgaggaattaagcttagttcctttcatttcactaaagaagttttaacccttgtggtggctcaagggctagggcttcttttggctttgagagcagatgaattgactcatccctgacctcagccctcagccttctgctgatttggcatctctagcttccttccccgaggtctgaccttttgcctcatttcctctgactcaattttgggttctgttcttggctttcagtttctgctctgagagttccttttctaaatttctgggtcctcttgtaggttagttactcacttgtttcagtttctctgctggtctccttcttagggtatggccctccatgctctgccacacctgggttgcatcagctgctcaaaggcagcatttctcacctgctgctgctctccctgatccagggccaacttggacaaatcccttccaaatgtaattggccataatcatgtaggttttaactataggttggtggcattaaatttccaagacagtaaaatgtcagggtggaaattcattgtttttagatactggagggactttctgtgttttaaatgcctctcaattatttttttcatccattggcacactttggaatgttaatatttgtagtaaatactgaactacatagataatgctgtttgtggttctaggaattacatgcctatcctagggactgaggggacgactgtctcagcctcctatatgatattatgtatagaaatgcactggttgagaagctctattctaaagtctccatgaaaacacaaatagatagcactgggcaggggttgggagagagtataacaccttaaacaattattctctagcttctttatttctatttgcctgtcaactgctttctaagggtcctagacagccctggaaaagttgccccaggaatacaaaaccttaagaatgaagataaggacactaaagtttctgtaggggctggagagggaatacctaaatctattctaagacatgttgggagatactaaaactggaacgagattgggaacaggcagagagttaggaggctaccgagggagttcaggaatgaggtattgagggtttggtttattagctgctcacctgtagaggagtgagtcacttatttaaattcatacagaaaatatgtaagcatatatggtgggttggttgttaatactttgtcaaatgcatgccacttaactaatcgtgggaggtcactataattaccatttagatgtgagaggtatacggagggagaaagaagtcaacagtaatatgcaagttactattttaattaattgggggaattgaattgccattcactaaagaaagactaagaaaaagatacagttttgctgggggaaatggcatgttgagttttgaacgtgcaagtttgagatatttttgccatataaaataatacctatctgaaaagtatttggaaggtggtctggaactctcaggaaaaagccagatcagagtaaacagattttagaagtgaacaatatagagatctatacattttcattgtgggccctggaaatcatattcaaaatagtatgaaaaatgtgtgccagtgtagtttttctgaggagggggtcctctatagtttcaaagaatcactgctacagatagatgagataggtaaattaagaccttaatggcaaatgggtagaaattatgatttttaaagtaaaagaggaaaatgaatcaaggataacttcagggtatttttttctttggcagcagtgcaagagtaggagaagaaattggtttgtgaagctatggggttagaaatactgaatttgaattagaatgtagctttgaaaaataatgtgtccaataggcagtaggcactgcggcaaaaaaaaaaaaaaaaaaaacaacagttgagagatctggaatatagatttgtttgtcttcagtgttatgctgataatagaagccctgagtgtatgtgagctttaagccaattattagactaaaaagagaacagtgaagaagtccaagttttgagctttgggtattacccagagtcgagagccaggtgaacagaagggctggggcactctgggcacttgacagaaaattcagtcgtgaattgactacagcacattgcttgccaaagccttgcccgaggcagctgctggttgatggaaacagctcagggtgtgtgtcagcactcttcctctagctggctggactggtagtcttcaaatccttttgctccctcatccttataacaatatttaagtcacatcatcttattatatgtacatatgtttagatgctgtagagaatatgtgaaaacagaaatttatgaagatgaaatacattgataaaagatgaatgtaatatatatattcttataaccaatggattattttgtgcaccttctgtaatgcttttttttaaaagaaactttattgagatactgcttaagtacaataagttaaactcatttaaaaggctacaatttagtgactattgacaaatgtgttcaattatgaaaacaccacaatcaagatatttccattactctcgaaagtttcctggtgcctccttgctgtccattcctctctctaacccatcctttggcaaacactgatctgctttctttcactgtgaattagttttagttgttataattttatataaatagaatcatatagtatctgcttttttttgtttctgtcactcaaaggatgctttttttcttattgctgtatgggatatagcaaaatgtctttatacatttacctgttgattgtcatttaggttgttcccaggtgtaaactattacaaaaataccagctacaaatttttttttgtataagtttttgcatggatatatgtttttatttgtcttgagtaaatacctagttatggaaaagcttgatttttctaggtaattagaaagtgcttggctatgcaaaaattattgcatttcccagcaaaagtgtgttcattaattcttcattcaacacacattttatttatttatttatttatttatttatttatttatttatttattattattatactttaagttttacggtacacgtgcacaatgtgcaggttagttacatatgtatacatgtgccatgctggtgcgctgcacccactaactcgtcatctagcattaggtaatctcccagtgccatccctcccccctcccccccaccctcaacacacatttttaagcaagcataacttgtgctttaagagccaacataaatattacatctctgcttttgaagaaatttaatttaagatatataaatttggaagccatatagatgattaagttggtgtttcaagtcacgagacaacacaattatttatcaaatggtagttcagtttgggaatagaaattgagtactgttggctctgtaagtgagaaaaaatacaaccaaaattaaaaattaaactgagaataaatgcaacatggtatcctggattggatgctggaatggtaaaaggaccttagtggaaaaatggctgaagtgtgtatggaaactctgtactatctttacaacttttctgtaaatttaaaatgatttgaaaataaaaaagtttatttttaaaaaaaggttcattgagaaaccaattgtaaaattaggagtttctgttcaataaaatttgtcctgaagctaaaaaaatttaaactgaactaaacatttgatcatatatgacaaagatacattcttattaaataaaatgcacttatcagtcaataataacaatcctactctcttcaaagaatattggacaaagtatataaaagcaatcagtaaaaggattcatacatattgctatataaggaaggaaccatattcacctgcctcaagtttttacataaaaggacttcagctacagtaccttgttccgtttcctcatttctgactccatcctaagctaactgatcttaataattggtgagaaaaaaataacaactgcttggctcggctctttctcaattttctcttttcctatagatgcacctcagctgcttgtgtttcagttttagaagaatcttggaaggtccaagtgttatcaaaagtcaagtattcttttctgatcagcctaaacattaagaaagctattttttaaaatcagtgtgattcctgtttctgtttttagtgattattaatgcagtgtgtgtgtgtgtgtgtgtgtgtgtgtgtgtgtgtatgagagagagagagatagagagatttggttttggggtggggtggtgagtacaattaattatctcaacccttgacagctaataaacgcttgaagatatattaattctccatagtaaccaaataagtgcaacttaaagcaaggttgctgctaccgaattgataattcataaaaggtttcagaaggaaaaatagccagttttgaagaatttttagtgaaaggacctttaaactgtgagtagaaatataaattggtacaattttccccaaaggcaaattggcaatttgtatcaataaccataaaatggttcatactcaattttgattttatgataaaatctatggaagcaatcacagatttcatcacaaagatttataaacaaggatgttagtcaagcactatttataatggacaaagaaagcaaaacagccttattatctaatatggggatattatgctacttactattaaagccatgaaaatcattttttgaagagtatttgttgatttgggaaaattaatatgatacagtataaattagataaaaacaagatacaatactatatgtgtgttttaattcgaattttgtaagcagcttctatgtaataagttttgtaaaaagcatttttataaaattataattttgaaaaataattttgtaacaaagccaacacaaatacattcataaacatatttgtaaaaaagtattattaagtgagatgattcttgtgctccagacttgtagctgaggttcaaaactgtgaacaaagtttactatgtactgcacagaaatggtaatttttgggggtgcacaatgtttgtgaggagtgggcccaattaaaagggtgtcctcatgatgcctgcctgccacacaggaggcatctaaagccagtgtgaaattgttaagcagagaaccaagagccaggaaaataatcataagagggtgacaatctctcccagttaagttaggagagatttattcgttttctcttccctgtctttggtggagttagcctttaagagaaaagaggcagtatgtaagggtgctgcttcttgcattcagaaccttgttgacagggaacccaagtgtagctttcattggtggcagggtaatggaagagctttaaatttaaggttgaagattgaaatttgaaaatgaaaggactgagccttaagtatcaaagcaagactcttctgtaactctaaatttacatgtacatgtcagtacatacatggcttgctgatggggtcccaactcactgctgtgtacacatgaagtggtttttatttatttatttttactgtcgcaggtcaaactctagtccctccctttattattgcaactcttattgatgtgttgaccagactctatatctaaattcgttgtttggtttttataggattgtgtatgtattttgtacatcatgaatgaatgaaaagagctagaagcatacgccctaaaaattgaagattaattaatgatcttttagtcatagatttatccattttgtttgcatctttagacttccttgtattttcaaaaacaattatgtataataatttataatctcacaaaaatatatatttcaaaaatgtcttctgtaaaattataattgaagatgatattcattgtgttacttgatttacatattttacaaggacacacacattatttttattcttaaaaaattaacacctcaggaaaatgtttcttcagataaacttgtaaaatttcttttatcagatacaaatatagggcctcttctgctctagttgtcaaaaaaaaagctaaattcattgctcagctgtcactgttattgattttgccctcatcatgtctaatttagaatccttcagcagccttctaattattccctgctctaacctcttccaccctcaacaatgccttccaagggatatttctagcctgcaaatctagctatagttatttccacacttaaaattcttcagccactttctatgtcacaaaaccaaactatgggcctggcactctaagcttttcctgctcaggactctgcctaaatgtcttttcttgtgtattgttcttttcctgtttgcattctattcttcaaccttattaaattacttgtaattttcctagagagctgtgatcttttcatgcttttgctctatttcttgtgttcttttctcttccatcctccttcttcctattgtccctgtctctggagaaaattttttcttttcctttaatgggctcccttttacctggcagagtaatctattcctttcttgtgttcccagcgtcacatgtacagaactgtaattcttcattttcttgtgtgtgtcttctgtataaatattaggagattctcaaaggccagaaccacgcctttctcaattagctaagggcttattatacaatgaatgtttaatacatacatatatatatatgcatacatatatattcacacacacacacatatatatatatatatataaaataacaaaaatcttcaaatacattgccttttaaaatccatgcaacaaactcaggaggcagatgttattatacaggtaaagaaatggaagcttagagatattatatttattgcgttgttatttgcttaatacctgtctcttccactggaccataagctcaacaaagtcagggatagtattagtcaaggataagctagcataggttgcaataataaaacacccccaaatttcagtggcttcttaaaaaccccaacatagtttgtttctcactcatactgcatgcccattgtgagtgtggtgctcttctgccacacttagattttactctgggatcagtctaacaaaacagctgctaccttgaacattgccaattgccatagcagaaggagaagggatgtggaaccacacaagggcttttgaacttctgcccatgtttcattggccaaagcaagccacatgacctgtcctaaatacaacaggatgggtatatataatccacctagagggatggcaccacagagaaaaatgaaatatatggcagacaaaataatctatcatagataacccaactgttttgtccacgattacatatccaataccctatgcctgattcattgtaggtctcagtatatggtgattgcatgattgaatgtcagaaggcttgtaggagtgccggaactgttatttgattagtctaactccagagaccagtctgaatgactttgctatttatataacttggtctcagatatttacgaatatccattctctgcttattctcttgtttgtttttgttttgtttttttttttttttgagacagagtctcgctctgtcgcccaggctggagtacagtggcgcgatctcggctcactgcaagctccgcctcccgggttcacgctattctcctgccttagccttgagtagctgggactataggcgcccgccaccgcggcgggctatttttttgtatttttagcagagacggggtttcaccgtgttagccaggatggtctcgatctcctgacctcatgatccgcctgcctcggcctcccaaagtgctgagtcaccgcgcctggcatattctcttgtttttgctttgtttataattgttctgtaaagggcatgaaattagttgctgtgactgtaaaagaattacagaaggaatgaccgcagaggtagaaggattccaccaatgtatagctccagagaaatcatgttacgaattcacaaggaaaagaataagagacagtatcaacagagcaagagattgattagacaaaaagactacgatttggttggaaaaggtctttgctgtcagatatttcaggggagttatgggggcaactaagtgaaggttttcagatttaatcaaactaaaagatagaagtaatagcaacagtatatatctttcagagcattctgagactgaaattgggaatggaggtgtggttgagatcccatattgaaggaatacagagattttctctttgcaattgaaatattcaagtgggctcattctccattttcttagaaatagagaaggaaagaactttaaaaattgaagaatggattttatctctgaataaccacattaatctcattgaatgacaaatcaatctgaacaattcactatggaaaaaagaacttcaaatattgtaggttagataggcactttttgcaattctaataatcttgttttatggttaaaataaaatatgaaattataaagattaattgaagtattgctttctcactaatgagattagattgtctgtggtcagaaatgtgtgttagtacaagagatttagtaggggtgagatgaatttcctgaagaggaattctagaggcagagtaagagcatatgttttaagtaagatgtatcttagccctttaaaaaattactttaccaccttaaatttaggttttaattcagtctgtagtccttaatagcagtgagtcaatgggaaaattaatcccttgggttcttcctttcttcatctacaaagtagagatatggtatttacattgacattttatttaataaataataatgcatggaagtattgacaatcaatggtagctccaaagatagacaattagaaataattacagaaataattactcagccatccactttcactcctaggaaagagcaggaaaagtgagattagatggacagaatttgatcaactctggtttactttttgacacattgaaatctctgtaaggtaagtcaggcttaacagtgctgcatggtgggccccagcccaggaaattatttttccttagagcctcagaattcatttagctacttggaattttaataaagaattttaccaaccctggccataatttacaaactctgtggcttgcctgaatccactgaggagagatgagtacattgcatgagacagggcactctgtctctaatgatgactccagctgaccacagcttggtcaggcacagtggaatgcagcttattctgcccctagaaaggttaaagtggttgcgtcatttataaactgtcagtcttttttattcttgcttaaggttgcaggagagtaattgccatagcaacagttatcccttccaatgctgttaagtacaagggtgccccttggtagaatgattggagattcaggaagttctaatcctgttatgatttattcaatatttctttgattttgaaactatttaacaagttctttgcacattttcctggaaagtagcatagattctgtataatagctcttagggctagaagctgtctcctaaagaagtctactttctccagtcctggtcttcctacatatagaagttctctatttcatgaaaactaaaaaaaacctgctttatccagttacttgtgtcttaaatctattttgtctatacttctccctaatctacttctctttctgacttctcattttagataatggtactaacttctctttctacaaacagaaactcagaattgagtgtcattttatactcattctgcaatctaaaattgatctgccaattttgcctatttagtgcagttgttctcattcctggcatgcataagaatcaactgtagagtctttaaaaaatgtcacccttaaaacttatccctggatatgctgggatatgaatgtccatcttttgtattgtgaaaatttcagagatattgaaaagtacaatataaaatagaaaaataaggtataaatatagcaaaacaactgtttagctccaacttagctcagaaaaacagaacgttaccaacatagctgatgcatcctatgtattgctggtctagcatttccttcttcctcccttcaagggtaatttctactctcaatattgtatttatttttcccttagatttccttataggtatgtgtcttcctgagcagtagctggttaaattttgtttgatttttatgtaaatgccatactgtgtgtaatctatgacctgccttttttattctctattatagttttaatatttattcatgctgatgcctgcacctgtggcccacttatttagtgtagtactccactaatgactatagctcaattaattaatcttctctcccgtgaatggatattaagattgttttcggtgattttttttggccaggtgcacatctttagtgcatatatctaggagtgaaattgctgtcttaaactttacatttacattttcaactttgcaaaatgatgcctttttttccccaaagtggttgtatcaatttactccaacagtcatgtatgagaatttgtggtgcttcatatctctgtctttacttgttactgcctgctatggtttgaatgtatgtgtccctccaaaatttgcatgttagaacttaaaccccaaacgtggcagtactaagaggtgagactttctggaggtaatttggtcatgagggctctgccgtcatgaatgagattaatgccttataaaagggctggagggacctagctaggtcctttttcccttccgctgcttctaccacatgaggacacagcatttgacccttctggaggacatggcaagcaacaggtactatcttggaaacagagagatccaaccctcaccagacactgaacctgccagtgtcttgatcttggacttcccaatctccaaaactgtgagaaattaatttctattattgataatttgctcagtctgtgatattttgttatagcagcagaaacatactaagacactgctcaagattttttttccaattttatactagacgttgtaaagtggtatcgcatactgattttaatttccattttcctgataattaatgaggctgagcttcttttcttatttatatctgccattcttgcttcctcttctgaaaaattcttattcttctctcctgttgttcatctgcattttaaaaaattctggacaggctgggcacagtggctcgtgcctatagtcccagcactttgggaggccgaggcggatggatcgcaaggtcaggagttcgagaccagcctggccaacatggtgaaaccccgtctctactaaaaatacaaaaatttgctgggtgtggtggtgtgtgtctgtaatcccagctactcaggaggctgaggcatgagaattgcttgaacccaggaggcagaagttgcagtgagccaagatcgcaccattgtactacagcctggccgacagagtgagactccatctctaaaaaaaaaaaaaaaaaaaaaaaaaaattctggagaggtaattctgaagagcagccaaggttgagagtgactgtctttatgtcttacttctgtcccttccttattgtttccactgcgcctgcactggttcaggcccttgccatgttataacgtctcatctgtttgcagtactctttttactggtctctgagcatccagtctccccactatcaattcatctgaccattttcttctccctggaccctagttctgactgatcatctaactcccttgttcagaatattggtgacttccacttgcctgcaagtaacatctgaacgtcttatatgcctctttgatgaatacctacctacatctctaatgttgcttccctctagtttcatcatctacactttctttctgcagattctaatatcttgttatgtcaatatgaacactatagtttcttccttccatgcctggccacccatgagctccactgcttatctgctatgtaccccttaaaaatgaaagcaatcatccattctctgtcttctaaactattgcaacatgtaattgtttatatttcccttgttctcttgaccactttctacctggtgttatagttgtctttgccaggtagcaaatccaggaagttataatccttcattctcaccccccatctcagtgcattttatatactaggggatagcaattgttttgtgaatgaataaaatcatgcaatggaaatagaacccaagtctcaggattgtctttttttatttttattttttgtaaaatcaatcaattcctcaaggtcaataactgagtcttctcaggctggtgtgttctttttcctagggtatctttcacatacttagtgtgaagataaaaggagaccattggcttcattgtttaagcaaacatatttaatattgcacaatcaactaactgtacccttaagaccatagatacattaaaaaaattcttagtgatgaaaaacagtaatattttagtgtgagtatgcttaaagaaaatagtttaaatattttaggaattaaatctggtgaataaaatgaactaggcaatactacttttcataaaaaatattgacagtgctctgtatgcaaaaatattagaggattgattatgtggaaatataaaggaataagactgaatttcttatgtgacttataaattacccctaaagtaatttatatatgaatacttcacctacatatatatatacacatatatatttatatatatacaaatatatacatacatatatatatatacacacaattcataaaccaataaattctctgatgtgcatatttgacaaccattgctggcattttacaatttcatttacagcaagcccttcttggtagtttctttgtgtgattgatgctgaatacagctttgttgctgcctcctcaggtctgagttggtgtgcaggcaataaggaggtccagctttctgaagcccagttgaatcaggctctctagtgatgctacagatcatcagaatggttcatttgggtgataacaaagttacattaaacacaatctatctctcataatgatggcagaagaatgtgggtgttttctttcatgaaatcccccagtaccatttggatcagtagcagacatgattaactggtgaccccaaagcatttcttattccttacctcttttatctcttttccccttccattagaatttgaaaagccagatacatacatgtgaccctgttctggccaaagaaacttaagtttctgagaaagataatttgcttcccaaggaaaggggtgtatgaagagaggtcattgacattgctcttccccacctcccctttttcaattgtggacattgttgtgatgatattatacctggaactgtagtggtcagtctataactacaagggcaaaaccctaaaacaatgaggtggtggaacacaaggatggaaagagactggttcatgatgaccctgtttagcaaaggaatgaaccctggaaatactttcctccatacatatgcataagtaaacaataaatgcttttttgtttgctgctcatggattttctattacttgaagctagatacatcctaatcgatagaatcacatgttgaaagagtctactatccataattatctcaataatctgtttgaaaacatctattggggccaggtgcagtggctcacacctgtaatcccagcattttgggaggctgaggcaagcagttcgcttgagctctgaagttcaagaccagcctaggcaacatggacaaaccccatctctaaaaaaaaattaaaaacaaaattacctatctatctatctatctatctatctatctatctatctatctatctatctatctcaacattctcttggtgagttttctgttatctgtcctgaaatgagcttcaagaatctcctttagttttcctttcctgagattttttttttctttaaaaacaacttcttactcatcttccttatatgctacatccttctggtactggctgtgaatacttttacagtgatggttttatcatctttatggcaatctgactcatatttaaatttcatcatattttgcatctggactaacataagatattctgtattcaacgacatggaagacttgcctgatttactgagaaattgctaattttgtccctttagggagttttaacaaactcttcacctacaggatagttttcctttccaaagttcacatttcataggaattcatgaaacttattggaaaagctggcttatgggaactaggtgtatccataaatcctcttgatacttcttgcaaaataatattagtagtctaagttgttatttttctgtccctgcctcctaagttactgatcattggacttaaagcatagatatttaataaatatgggactttttattctagggaagaagttgcatataagctgctaatattcaggtagaattttttaaaaatttgctgaggctgagtgtggcctagcatggtagtgaagtccctgggaccataatatttaataatagagggcttcatatattttacagactttttcctcctgaggtcccaccaggtactcagagttactttgagggaagattagaatgaatcctaagaaaactgcccttgttctctatagtgctagctgggggaaggaatagtagccactctgagattgcccacacctacctccctaatcttcatatggacaaatgccttaatctgcaggaggaagagtaactaaaattgtagcctgagagaactggtgcaaatccactgcgtcttggggaaaaaaacaggaaaaataaaaatgttctactctgggaaggggcaggaatgtaggttttgtccagcaatacttccggaggagaaggaacacttaggaaaattacaccccctattgtgacccaggttcacaatgcctgattaagaatgaagctgaatcagaatattagatgctttccacactctttagccctaccccaccatgtacatcaaataaaaataattgtgacatacaactgggaaagctccaacaaggagtttctcttttgagagaggtgcaaagggatagcccaaagcaaagaaggaaggcttctgaaaaattactgcatacattaagcacagggtatcactagagaaatttgaattctgaaattcactgcgtgtaatcatagcaactgcaaacatcaaaaacagcccaacacctgattagattaacacaacccccttccctacgctaaacatttagcagaacaaaaggctcactcatcgtcaagcattaaaaaacatttacttccatatctactgtcaaattttttgttgaaagctggctttcaacaaaaaattacaaggaatacaaaaatgcaaaaaaaagtcatttgaaaagacacaaatcagagcccgtctcagatatgacatagatattggaactatcagaaaggaaatttaaaataactgattagcatgttaaaaactctattggaaaagttagacaacatgtaatggcagatagataattttagctgagaaatgaaaactgtaagaagcaaaggaaaatgctattaaaaaaaccccacagtaacaaaaataaagaataccttcaactgactcactagtggacttacatagttggggaaagaatcactgaatttggaggtaggtgaatggaaatttcccaaaataaaactcaaagagaaaatagatttgagaaaaccgaagaagatcagagcatccaagagctgagacattatcaaacagcctattctacatctaactggaatcctaggaggagaaaaaagagaaaactagtcagaaaaaaatatttgaagaaataatggctgagaatttcccaaaatttggtaaaacgacaccaaattatagatccaaaagctggaagaacatcaagcaagataaatgccaaaacctcacacttcaacatataatgtttttaaaagttgaaaaccaaatacaaagggaaagtattgaaagcaggcaaaggaaaaaagtcatattatctgcagaagaataagaattatagcaggctcctcatcagaaaacatgcaagccagaagacactgaagtgacgtatttaaagtgcaaagaaaaaaattgtcaagccagaattctatatttttcctaagtggaaagaaaattaaacgccttctcagaaaaataaaaactgagagaattaatggctatcaaatcgaatctaggaggaatgtaaaggaatctcttcaagtcagaaggaatgtcatatagatcaaaaaatggatctacacaacgaaatgaggaacatcagtaatggaataagtaaaagtataataaaatattttcattgttattattattataattctgaaacagagtcttactctgttgcccaggttggagtgcagtggcgtgatcatggctcactgcaacctctgcctcccggtttcaagccattctcctgcctcagtctctcgagtagctgggattccaggtttgcgccaccatgcctgtctaatttttgtatttttagtagagacagggtttcaccatgttggccaggctggtcttgaactcctgacctcaaatgatccgtctgccttggcctctgaaagtgctgggattacaggggtgagccactgcacctggtctccttatttttattcctctaaaggatagctgactgtttaaagcaaaattgtaaaaatatatattgtttttgtaacatataatcaagtgaaatttatgacaaaaatgatacaagagatgggagggaggaattaggaatctactggtttaaggtccttatactacacatgaagtgatgtaatattatttaaaggttgacttattttgttaaaatatgtaattataacccctaggaaaatcacttaaaaagtttaaaaaagttataattaataagtcaatttaggaaataaaatggaataataaaaatgttcagttcagctcagagatggcagaaaaggaggaaaaaagagacaatgagtaaattaaacaaatagacgacagctagcaagatggaatatataaactcaaccagattaataataactttaaacatgaatggtctaagcatgccagttaaatgtcagagattttcagataggataaaataacaagatccatctgtatgcaatgtacgaacaacaacaacaaaacactttaaatataaagaattatataagttaaatgtaagaggatatggaaagatataccatgacaatgctaactgaaagaattatggataactatattaactttaaacaaagcagacttcagaataagaaatattatcagagacaaacagaggcattgcctaataataatggagcaaattatccaagaagatataatcctgaatgtgtatgcttgtgatgtgacctcaaatacatgcagcaaaactaccagatttgaaagagatagaaacaaatttacaattataattacaaacttcaacactcctttcttattgacaaaacaagaaggcaaaaatcgttaaggatatagatggcctaaaccatgctataaaaattatgtatttgacctttatagagcactccaatcaacaaaaacataatttttatttttctccagtgaacactgaacattcacaaagatagactatattctgggccataaaacaaactttaattaatttaacagaatagaagttatactaagttggttcttggataagaataaagctaaactagaaatcaataacaaaaagatctattgaaaatccttcaatatttgaaaatgaaaaaatactcttctaaataaactcagggtttaactaagaagtctcaaggataatttaaaacaaaacgaaacaaagcaaaaagcatctggtacagataaccaaggggaggagaaaagctagaatgaaccatgttgtattaggttatagtcagagatgttggtacgatctcatgtttagcttaatataaatgtaaatggagagatacaaaaataattatagctaaatgtgtaaattagctctttctgttaagaactagagtcagtgacacttcagtggcaatgagcatacagagaggtttctaaacacagttcttctaaaaggaacaagggactcttaagacatggccagttctagggctggacaggaaaatacaagatgtgcttgaaatatctagtagtgtcagaaaataaataagtgctcagaaacaagtttacagaagccaagctgaaaaatgcttcccatggccaaaattggaacaatttgagcaagaaaataaattatgtggcactgggctacaacacaagtataaaataaatacacgtgcatctacattgatataaacaaatgattgaaaaataaataaattgaaggagaccaacctttcttacagaaatattacataatctatgaaatattgtctcctctagggggtcaagcttaactctctctgccttgagtgtggactgtactttgtgtcttgcttccaaataattgaatctgcaaaaggaaataaagtcgcttcacagtggagaactctcataaacactgacttgcctaggtgaccaaggttaacatcaccagtgatgagtcatgttgatagcaagtaacctctgataaaatgagatgagaagcacacttcaactctgtggccttcttctccaaaacacctagccacatttgaatgagaaaaccaccagacaaaaccaaattgagcaacattctacaaaatacatgaaagctactccccaaatctgtagaggtcatcaaaagcaaagaaagagtgagaagctctcccagacaacagaagagcatggtaaggagacatgacatttcagtgcaatgtgatcctggaatagagaacaggacactagtggacatactagtgaaatttgagttatgtctggagcttagttaatagtaatgtatgaatattagtttcctagttttgaaaaatgtattatgtttatagaatgtgataacaatagagaaaactaggtgatgggtacaaaataattctctgaattatccttgcagcttttctgtcagcctaaatttactctaaaaattgttaaaaataatttgaactaaaggaaaatgcaacatatcaaaatttgtgggatgctactaaagcaatgctgaggtacatttttagtgccaaatgcctctattgaaatgaagaatgagccaaattcagtaacccaagcttacaccttgagaaattagagaaagaagcttagagaaagaagaacaagttaaaaacaaagcaagcagaaggaaataaataataaagattagagcagaggttaatgaaactgaaaacataaattcaatagacaaaattaatgaaaccaaaagctgactcttttaaaggatcaatataattggtaaacctcttgcaaggctgattaagaaaaactgacacacattcctaatagcagaaatgaaagaggggacatgactagtgaattcacaaacattgatagaatagtaaggagaccttataaccaattgtatgcccataaattcagcagctttgagggactggatccatttattgcaagataaaaactatcaaaaagaatattagaaaacttgctagttctatggctattaagtaaattgaatttttagtttaaaacctgctaaaggaaactctaggctcagtttatttcactggcaaattctatgaaacatttaggataaaatagtcccagttcttcacaatctcttccagaaaatagaagaggaggtagcactttccaactcattttatgaagccagcattttatgaagccagtcaaagatgctataagaaaaataaactctagatggatatctcccaggaacataaacataagattcctcaataaaatattagcaaatcaaattcagcaatatgtaagtgtgagactcaccccactgatgaatatctagagctaaatgaaagcaaaaatgtcttcattcattcagctattttaaaaaattaaacacacatttattcagtatttactgtatgttagaacatatatcgggctctgggggtatcacttaaacaatgacaggaagaagaacttctgttgtgacccctggagaaagagatcagtcataaccattggtgaattccttttaggagacacaaaaatgacaagacgtatgcatgccatcttcttgagattccactatattgctgtgaatttgatgttgcttatgaaatctttggactcctaatgataggtgtaagattgaaagaaataatcacaatgtctagacaaatttttatgaagattctgaggtaggaggtaaaacttaaggctttggaagcatataggaacacattcagtgtttccattgcaggatgaaactttagaagacagaagatctggaagttgaacagctgctgtctgtaaacttgaataaggactgaaataacttttggctaaagataaaaaaaatgatatgcctgcaagaaatgtatttaattggcatctaggtaacttggtcgagagtgatttaaattaaatgtggaaatgaagagaggatttggtccagataaacatatgactctaatttctatgtgtcgagcacagagcgggaaggcaagactgagagtttttgtggcatccagtgaaccactgtggcattcagtgattcagttcctaagaaaacaattaggaaaaggcccaggaatgctagtggtaattcagataccaattcaaagatcataggaaatatggaaagtacattgagattataacttgggaaagtataattggtcttatatgtatcactgagtcctggtaggatagaagtcaactttggaaatggtggaaaggtatgtcttctgacaagttcaatcagtggttttcaataggaaataaagagtgagggtcgtgagcatcagagtttcatgtggaattttaaaagatctgactgagtatattgctcattaaagttattaggtgggtataaatagtatagcaaatgattagaagattataatagtcattagtgttgctcaataatattttgagttctactcttgagctcagggaatatagcccttctgtgcctcttctttaaagttaatgtgactttctatgatgaatgaaagtgagcaaagtgaacaatgttatcaggatttggagcacatttgcatgagtgagaaataaatgattgctgtattaaaccatttagatttaaggatgatttgttaccattgcataatctagcccatcttcattgatacaaagatgtatgtcattgtaaaaatttatagattggtgacaatatataatagatgattacagaagtggatttcaaccaagttttaactataaaaatgttttctcgaatacaagcttacagagattcccagtatataaagagataaattatgcaaccgctttgttagaagcaaagctgcactggtctctagccagcctttccacttctcccctcaccagactttaaggcgtctgaggtccttgtgcccaatttgtagaacctctaaagcataacaaaacacagttgaaaaaccatagctataggaagatagatttttagctcaataaaaggaagtactttcagtcagaaatgtccaaagatagaattggctactaaagtagtgagctgctgtcacaggaagtgttaaagcaccgattggttatactaggcagatgtagtgatagaaggtattctgtcattggctgaccacttctagcatcagaggttttgattcttaggcctcttccaatggataacctcttctattattctttatctctttctccgccttatttttcttcattaacattatcacttgtttatgttatataaaaattcatctatctgtctagctagcagtgtactgaacaaattattaaattttcagaaattttttgagtcagttgttaagcacagacattgttaaaaatcaaattatttaaacttacaattaaattatatcaaaaactaggtaatgacactcaaaatgcatcactttctaattacttggctacattttgctgttacctgtgctcttgagcttatttatatctatcatgtctgtatggtggatatattatataatgatgtgctatataatagtgtgctatgacactgagtttctttaagcaagtttctttctttcgttctctgtttttttgagatggagtctcactctgtcacccaggctgaagtgcagtggtataatctcagctcactgcaacctccgcctcccgggtttaagtgattctcctgcctcagcctccagagtagctgggattacaggtgtctgccgtcatgcccagctaatttttatatttttagtagagatgggttttgccatgttggccaggctgatcttgaactcctgacctcatgtggtccacctgccttggcctcccaaagtgctgggattacaggcgcctggcctaagcaagtttctttaagcaaacatttgggatatgatgttgagtttcttgcttaaagaatgtgtaaagcacttagtatgggcctcttacacagtaaaacttaaatgcatgtcaactattaagtttttataccttatatgaaggattttaaggttcacgtctatatgcaatgtagaattttaagaatgagaaagggcggaaaaaccagtcatcatttgctgagcctctaccatgtgccacagactgttctagagaatttacactaatggtcaaattaacccttcatagtcccatgagagaagtataatttggtataactaataccattttgtaaatatgggaactgacagaggcttatatatagccacgtcttcatgtctaaattgaggcagaatccagatgatagcccacttatttttgactccaaatttcattttgccacttcctgggttgtactggtaagttctaaatcacaccaaaatcaatagagaagccaagcccaactttgcatccatggtgttacattggtagtttgaaatcagttatggtgcaaataattacatcacaggaatcatcaaactctgtaaatcagagcctcatccctggagaactgcttgttaaatatttaccagcacaccactctatccatctatagctctcaacgcctctggaatttaacctccataaagatacagaacataactttgttatggtctttgttgtcagttctcaacaaatatttacttagtgaataaattaataatcaacaaataataggacaagcaggaatttttaaataagcaagttgagaaaccagggaacatgaatgggaaggtttagatgagactgaaattgctttctgtctttttctggtatgcctgctttggctgtttcatagggcagtacataggaaatggcatctaacactcttcagtttgtgtatagaaatcatccctctctgttctccaaagagagcttcccaaagcaattcctgagccattcacaagtttctgaagaaaatttgacatttttcctctcttgtggtgttcatcgtaagtgtatttgcaagcaggagtcctgattttataagcagagaaaaaattttaacccagaaaagtgttaattttcaaaatacgatatcggcaaacctaaaggagaagccaagaccaattaggtggccctcagagaaggctgagcaagtgaaaaataaaggcaaatccaaccatcttgagtaggtttcactgaaaagttctcttgattgaaatctattgattatcttagtgaagtcactagaggcatcaacttttgaccagtttggccacatttaaaaaatgttttctgaggacatttgcactgctgtagactggggtacatgagctggagcactacaggcagtttccaagctgtctacatgttaggtctgcatggcagttcaaaaaattgaattaatgtccagaaattaaatatcagaggatttctactaaaaatctggatttctgagttgtcttgaaaattcagtatatccagtaacaccagacctgtattcccacaaggcaaaaatccacttgagtgaagtagctttactctcttttttttttatttatatatttttatttttatttttttccgagatggagtcttggtcttgtcgcccaggctggagtgcaatggaatggtctcagtttactgcaacctccgcctcccgggttcaagcgattctcctgcctcggcctccagagtagctgggactacaggcacacaccaccacacctggctaatttttgtatttttagtagagatgggattttaccatgttggccaggctggtctcgaacttcctacctcaggtgattcacccgtctcggcctcccatggtgctgggattacaggcgcaagccactgcacccggacttagtagctctgctctctttagatgggtcatacattctccaactcaccgctatccttaccatgtccccatgtcctatacatggtcatctctactctgtaagatcatttatctggtcttgtcttcctctgatatcgcctcagagtcattttcctcatgtaatattgattacatgtgatggttgggtgactagtgagggctacagtctgttgtttagcatccagtaattcttctgcgaggctgttaaccttcctggttttcattttcctcaggtgtaagtgaagtggctgaaccaggtaaacaccggggcatcctattgctctggccttctatgctcacacatactaagctaagcacttgtactattctctgacagctttttttttccaactcctctacatttttgtttcaactcctttacttttttgtttcaactcctttacatttctatctgtattgctatatctctctttctccatctttatctctgtctttatcatcatataaaagattattgttctcttactctctattttagagaaggatgcctacagcttatccatggtagagaggaagggtgttggatcttcatgaaggcaaaagggcatgcctgaccgtccattctccattcttccttcctatgagagacactgctttctttgtttatagtcttcatggggcttaagcagtaaaacacgctgattctaaaagaggattccagaactcagggagaagacttcctttttacttccgccatacttcctgagtataatttgctcataatataaacagatcaactgctggaaatgtcactgtatactttttaaaattaaacataccagccagcaccagtttttttttttttaatcattaagctaccatggtgatagatatcctagacacatgtatataaacaacaatttacatttttctatatatactgccctagagattatttatatatcatgtattgtatatacaaaggacaaagggcttatcacatttaaatggatagcttctgaaacagtatttctcaagtctggttcacagggataaagatactacctacaggccgggcacagtggctcacacttgtaatcccagcactttgggaggctgaggcgggaggatcacctgaggtcaggagttcaagaccagcctgcctctactaaagagacaggggcaaaactccatctatactatactaaaaatacaaaaattagtcaggtgtgatggcccatgcctgtgatcccagctacttgggaggctgaggcaggagaattgcttgaacctgggaggtggaggttgccgtgagtctggatcatgccactgctcttcagcctggacgacagagcaagactccatctcaaaaacaaaaacaaaaaatactatctacaattcattagcatcttcagtaacttgagaaccagagtatatggggaaagctgacgaacaaccttactggcatggattttgttttctttacaattcctatatttttaacttttattttaagttcaagggtacatatgcagatttgttacataggtaaacttgtgtgtgtgtgtgtgtgagagagagaggtctgttgtacagattatttcatcacccaggttttaagcctagtacccattagttatttttctacctccaccttctgaaaaggcccagtgtgtgttaccttgttcccctctatgtgtccctgtgttctcatcatttagctcacacatgtgattttattttagcacaactcctgtagtgtacttttgcagtattttctaccactttggatataaaacatcattgcaaaaataaatgcattttattttagtgtcatagctagctgggtagtacacagttgtttgaagggattgggttttttcctcttgacttccttttttgttcattagaagtgtatgtcttgccagtgaaacctccgcatgtactttttatttagagtccgtaagaacggacattatttttcaaaatgggtaaaatatttcactaatgcatttgttattttgtgttctagatcatcaaaaaaatgaatattgacaagaaatttaattgccccttgcttgtggaggaggacagagattatgtggaaataaaaactatagtagaaacacactttcaagcctttataaggtgtctactttagaaataattttgtttagaacagtttacattttgatctaattaatcttttcttcttccttcctttagattgtcactatatatatacgtatatgtatatatatacgtatatgtatatatatgtatatgtatatatatgtatgtgtatatatgtatatatatgtatatgtatatatgtatatgtgtatatatatgtatatgtatctatatgtatatgtgtatatatatgtgtgtatatatatacatatacatatatatatgtttttttcctcccatttctttattgtaggagcagatagtgctagtgatcgatttagccctgaaagatgacttgatagtactaggttactctaatagcattcctttactttctttttcctttaataagaaaggcaggaaaaaagaaattctgtttttcttggtgtttggaaaagcttcactaatgttaattattcttactgattcataagctcaagaggtttctgttgattaaaaatgacaattgcaagcacagtttctgtggaaccaaaaataccttgaagctagtaagtgttttgtataatttcattgtgttggatgatgaacttaaaaaggttgtattaagaaaaataatttattgctgaaaatcagttgtaacttgtggcttgtgcagtaggtgtgtaagatatcgaatttttgctgtatactttaggatttggaaatacttagactataagctataaacttaagttatgaaataacagttataaaaatctctatattatttacctccagctttccaagattagatcttttgttagatgcatgttttgctgtgattttattttattattttatactttcattcaataccaatgattttttttttttagtattctcctattatctttttctttaagttctgggatacatgtgcagaacatgcaggtttcttagataggtatacatgtgccatggtggtttgctgcacccataaacccatcatctacattaggtatttctgctaatgccttcccttcccttgccctccacaccctgacaggcccctgtgtgtgatgttccccttcctgtgtccatgtgttctcattgttcaactcccacttatgagtgagaacatgcagtgtttggttctctgttcttgtgttagtttgctgagaatgatggtttccagtttcatccgtgtccctgcaaaggacaggaactcatccttttttatggctgcatagtattatatgatgtgtctatgtgccacattttctttatccagcctatcattgattagcatttgagttggttccaagtctttgctattgtgaacagtgctacaataaatatatgtgtgcatgtgtctttatagtagaatgatgtataatcctttgggtatatacccagtaatgagatttctgggtcaaatggtatttctggttctagatccttgaggaatcaccacactgtcttccacaatggttgaactaatttacactccctccaacagtgtaaaagtgttcctatttctccacatcctctccagcatctgttgtttcctgactttttaatgattgcaattctaactggcatgagatggtatctcattgtggttttgatttgcattgattttaaatatatataaaaaaaataagccaagtgaagttagtatgtgtaaattgcaccacatgaggataaaaaagatggctgaatttcatagaaaactatattgtggcatctaaccatatccttaagactcagttaataaatacttctgttttatatgtatatgtttgtgtctgtgtgtgtgtgtacgtataaaatggtgagaagtatgaaaaagttgtaatagaagcaaatgaacataaattcctcaaaagaaagatagattggaccaagacatcatattcaatgttgcacactttaaaataactgatttataataaaagttttaaaagaaaaacatatagttatactaattaagcttgatgtacaaaataataccaaattggatttaaaaagaattattttcttaagatactaaaaaattatcctgatttttaatgagtagttacaattttattataactttttaaaagtttgtttgcctttagcatttcttaatattattgtaagcattaacaatactaaacaaaacaaaaaagagtttgaagattcagtcgagacaaatagaaataacagtaaaaaaagttcccagaaaatgcgagctatttaagggcatgagccatctcttatgttattttggttaaataaatgtctcagatcgttagctacgagaccctgtgctgggcactggatgaattagacacacttcctctgtccaaggtcagatgaagtggctatctttgctccttatgtgcatatttttcacctctgtacttttggtacctagcatagagctgaactcgtaaaaggcagtcaatatccccttgtcgcattgaatcaaatgtttgttgttagactgaacaactgaaatttcggaatcgctatgttgagtcattttgggcttctcagaaattttgtaaatgaaacagaatacaggtgtagggtattttgaacttgctaggatgcaaattatttaacaatattcgaatgaaatcattgtacttagaggccaggcacggttgtttacaccggtaatcccagcactttgggaggctgaggtaggtggattgcctgagctcaggagttctagaccagcctaggcaacatggtgaaatcccatctctactgaaaatacaaaaaattagctgggtgtggtggcacatgcctgtaatcccagctgctctggaggctgaggcatgagacttgctttaacccaggaggcagaggttgtagtgagccaagattgtcaccacttcattcactccagcctgggtgatagagcgagactctgccttcaaagaaggaaagaaaaaaagagagagagagaaagaaagaaaaggaagaaagaaagagagagaaagggaaaggaaaggaaaggaaggaaggaaggaattattgcacttagagttcattgccatttctagttatgttaatgcttagtatagaggagtctggggtaaggtacctgtgtgatcttggggaagcagcctactgtcctcaaactagggatttctccatctttaacatgagggccaaaaacgggttatgaaccagaagtcgcagtcatctaaggcttcaagggaggccttgaattacttagaatggtatgcaaaatgatttaaatatgtttgaaaatatgtttttttacttggagaggatccaaacttcaatagattctaaataagcctatattgccatctctctggtctaaattatctctagagtttattttacttcgaaaaatagtttttagtgtaacatacaaaaattttaatcaatagattaaaagtaggcaacaaaccatcaacatgttattatataagagaaattccattttggattgttgtctgttttctaccctgattgaataattaaaccgtcaagcagctaatgaacatttattgataattattatctattctgagtggcaataacaaaaggaaatagtgaaagatataccaataactttcttcaaagaatccattatctaattagaaatattaaatcaacttagtctttcccttcgatgtagtcatggaggtgaatcttacaccatggacaattagagggagctatatttaagactatatgggttttaagcgaaatagatcatttctagggtatttattagggagatactattttcaagatgttgtgctaatccagtcatgccaggcatatttattgagtattgacttgccagacacaaaaaaacactaataaatactatgtatggtctctcaacattaagaaagtggttttttttgcaggaaatacaaaaacaaataattatagtgtttttattcagtattataattcatatatgaaagagttgcatgggagaacagaagcggcactctaaggtgacccctttttgtgatccctggctcttagtagtttgaagtcttattgagtggtataataaaacatgcaaacaactaaaacataggacaacatatattgtatcatgattagctgcaaattgccatgctgtttctgaggaaggaggtatatttataccaactgtaacaaggaatatttaattcagcagatatttattgttactggatttaagtcctataatgttcatccgacttgttattccaagcttaagatggtacttagcacttggcatgtattcagtaaatatttgctgaacagataaatacatgaagacccacttcatgccaagaatagtgcaaaatacccacaaacatagaggcagagaaaaataagtttgtgccctaaaaatgctcacagtcatcatatacatgcgtgtgtatttattttcaaatcactatgttacatggtaatagagttgcatgcagagcacaagaggtacttctgaatcttcacagaagagacattgacattctcagagaatgggtggcgtctaggaggatgaataggagctcatgccaggaagatagggaagtggaggaaggagttccagacagagggtgttacatatgcataggcactggcatttgaaagtttatggatttgggggataactatcaaatgtgtaggatgtatatgggtaaaggaaaggagaaagatgagactggagatgtagaccattggggaccatttcttaaagggccttttctgtcatactaaggagctggagtcattctgaaggcctgaggtacactgaggaattatgaagaaaagaggttatataggaggtatactcaggaagtttccagaaagagtgaggctgagaaggcccagcttccaacacacgagagacatacttacacttcctaggaaggcccctagagaagagaattacaaagattcatttgctggcttctctttcatcatttgtttttatcatttggagcctggatactccaatacctatatggcaaactttgccctttccttccccaaggtacagctgttaagagagtgcatgaaaatttcccactaccaaatgccatgggtggttatgagaagcacctcttgttaacagttaaaaagtaaaatacattttggactttcagcttttcatttcctacctatgggacatggaagaatgttcattggtgtatataaacttgagtttcttaatgtgaaaaataaggataaaagtttttaagtatatatatatgcgtttaatcagtctgttgaattaagtcagtaggtgttgaaagacaggatttgttttttttcccttaagtctgcttttatcttacatttgcaaataagaagttttgtatccaaacatattattcttccaaaaattttaaggataaagatgtacttttaaaagaagctataacttagcattttcttttggttaaatataattattctaaaaatggcatatctctacattatgtttgcttggtaaaactgaatattactcgcctgtttccacagtatgacataagtggaaataagacaattatagaacatcttcataacaaagttaccatataaagcttatatgagtggatggcttaattagattgtttttaaagtttcaggtagttcagtttcttttttcctggtttttactttctgtttgaccttcagagaaactaactgtatttacctcaaacatttcttatccacatgtcttcaatatataatcataatatttggtacatctgaagtgcctgacatctgacgcttctgaattgcttcataaatgtggatttaggccttgggggccagatggcaaaagtcaacagaataaaagtatttattaggtattcatgattgtactgggtgctgtactggataacaaaattgagaaagaaagtattttctatgatttcaggtatcctacaatttagctaggcagtccaaacacaaatacatttttgaagaggaataaaagtagtgcgcatggaagtgtttggcatcgccttgatgatagatctaacattaccaaagaaatgttgtctcagagctggactctcgcagaccgttgtgttctcttagacaaatggaagctttccagctaaaactggcttaattcattactatttacttggtagccaaaataacttactgccttattttgtgttggatttgaaattcaaaaaaaagtaaacaaaacaaaataaaaacaaatttgagtttcttgtaatttattttattatagggagttttgttccaagactgtttagtgaccaaaaccaaaaaggctgctgtctttaatatgtagtttattctccccacaaacacattacttgaacagcaactaaaaaaagagataaaaagaagtggggaggatatactaggcattctcttcttcttggctcaaagcttagaggttgtgaccagctggacagctttccagaaatcataagcagatactgggccaattgtttttattacagaattatggaggaattctgaggtgtaaatgatttgtaaagcagctctatttaggagtagttttgcggaggtttggatcaattcagtgggttgtagtttgacatatgaagtgataactgtatgcctagacagtcccagctgctgaatttgcaactacagtgaagagttctgcccacccccatctgtctaaggggcatctccacctgtcatttctgtactctggcctctatgacatgataaattgcttttaattagaattgcagacaatttttcattctctggataatgtcccagcgtacaacataacatccaacataactttggcagttcagaagtgagcttaaacaacatgcagtacttctctccacagttataaataattgtaaataatttgttgagaaatatacactcattgcaatataaacatgaaatgcctttatttttccaatctaaatttttagccctgctctgtggatcattttctagcatcctttaacaaaatcttggctagcttctatagcttcctagccacttctcagttattaagacttagtctagcccagtttagaacttcagtctcgtgtgagtcaaagctccctctctctacagcatgggctggagttgtaaccctaactttattgtaggggtgagatatggtctggctctgagataccgtcaatgttttactctttgagatgaataagctcttctggtttaaggaaatgtgggcggaatgaaggaatagggaagcagagctcttggtatagctggtctcatattgatgatgctgaacagtgctcctgctgtcactgtattccatccagttctggtctctgtccatgtagagcgatatccacctaagtgctgtgcatggtcctcggggtgtcagctttacccctgcaccctttatctttaatgactctttcagattgaggaagtcagatttttcttaagttctgcatctcctttctccggatgggtgtctcattacaggaaaccatgagaactcctccaactttttctccagtccctatgcaggggcttagagaatagggaagtaaattaccatcttgttcttcaaagccacactgtatcttagtatctttaagctgtgcctggctggccgcctcctccgtgggcttttcctcttcagaaatcaatttttcagaagagggtcccaatccctgtgttcacatatctttcaaacttcaggtgttatggtctaagttcttactaatcttgtttgactccatgacagcactaggtaggcctacaggttgtttccacccaggaagcatccaatcagggtggatgtcacgaccttccagtctctatcaatgggtctctaggagccactctcccttaattccagtgaggagaaagcacagagagaggagggtgtggtttctgtccatgagctctgcatttcccaacccctttgggggctgacaacaaacttcactagactgggttaagtatagaataaagtatattttaatagataaacatagggcaaggttgtggaattcagagaggcaaaaatgaacacagttgagaaatcgtagaacatgtttggagacaaagaaataggtcagtttggttgtggcataggaggtaataaaaatcaagtttcagtaagaacaatttctgacatatttttaatggccttgaatgctaggttgatgagctttgagttaatttaatttatgaagggttaagaagctaagatgctaagaatgtagctgtgaatgaaacagaggggcaaattcttacaagtttggatattgttgcctacattgtatttccaaagctttctggagtagtagcaagtgattctgaaagctctagaattctagctgtgtatctagtgttagttagagttacttcatttatagttatagagaggaatagttttcatttcagttatctggcacaaatggagtgtttttatcataaatttgtattactagcaatttctcagcttttggcagataaacttaataagacataccaatccatgataacctttacttagagttacagggaaaaacagtacattctttgtgtatggtaaacaactctttcctggtattgattcaatgtgggaagaactgtaacaacaaagcagcaatatgacattaaattcttgttgaccacattatctgttgtagatttaaaaaaacctgttttctgctaacagtcataacattttctaatattgttgggcaatagcattgcttgcttttgttatgatcactgttctagatactgtagttgtcatgacaacaaaataacactaataataacaacaatatataacatgtattgagctcttactatatgtcttccattttgtaaaacattttccatgggctcatttgagccccacaacaacttcatgaggaaggtactgagggaactgtggcatagggaggttaagctttttgactatgatcacatcacatgtaaaggtggagccaggatattgttcaggcagtctgaattcaattgctgggctcttcaacatgacagctatggctggggctgtacagaagtcaggattgacattgtgttatattcaaacatatgagcagattggatggctgtggccttcagatctttatttaatacaagttgatggggctacctctttctcttagcctctttccttgctgaaagtccctgaatccctttgtgattatagcagaatggatatctctaaagcgtggtgacctggtgagttgtcatgattttctgcagttctcagcagcctgtgagtggcacaactgaaatcattgtcctttcttcattgtcactcctaccttcatgtaagtgttgaacacatagagaactaagaagcagaaggtattaagggaaagtccggaaaggtggcagttctttagtatactatcatcatttgacatcaagccctgagcttggaacatttggaaactcagctttattagtacaataagagctcagcaagctcaggaagatgacttcatccaaattaaatgaatgggggagttaatgtattgattaattttgtgaattcataaatcgtaagcagatgactgggccaattgtttttggaacatttggaaactcagctttatcagtacaataaaagttgagcaagctcagcaagatgacttcatccaaattaaatgaatgggggagttaatgtattgattaattttgtgaattcattaattttttaatgaactatgaggtataatttttaaacaataagatggacccattttaagtgtacagctttatcattttttttttttgagacggagtcttgctctgtcaccaggatgatgtgcagtggcgtgatcttggctcactgcaacctccaccttctgggttcaagcagttctcccgcatcagcctcctgagtagctgagactacaggcatgtgccaccacgcatggctaatttttgtgtgtgtgtgttttagtagagacgggatttcaccatgttggccaggatggtctcgatctcttgacctcatgatctgtctgcctcagcctcctaaagtgttgggattacagctgtaagccaccacgcctggcccagcttgataaattttgacatatatgtctgtgaaatgtcaaccacaatcaacatgtaggcctttctattatcttaagagtctcttgtgccaacttctagtcacttcttatgccctactctcagcccaagcaaacactgatatgctatcaccatagattaatttttctttctaaagtttcatataaatggaataatatatactcttttgtggctggcctttcttattcaacaaaatgtttctgagattcattcatgttgtttcatgtactaatagttcattcatttatgttgctgacaatatgttattgcgttgatatatgacaaatcattcatccatttacctttgttgaacatttgaattctttccagttgccagctattatgaataaagctactctcaatatttgtgtaatagtcttattgtggatggaaggaagtttctatttctcttggtatatcagtcagggtccaatcaagagacaggaaccacaccatttaggaaatatttaatttaaaaatattattaaaatcacttaatagataataattattaatagaatactatcattagaccattggagtaatggaaaattggctattaagaggtaaagagaattctagagaacatgggattagcagaatagaaagaagcaaccactctatttgagagggcatgctcatggctcaatagatagtggggtatttctgtaaaatgtctcactaacaggactccactggctatttgccttcagaagtgcaaggggtaagtgttgatggacaggaactgtacttcagaactcactggagagatactcaaggaggggttgggaagctgttgaagtggaggtgccttacttgtcacactcactgggaggtgattgtctgggttaccaaggaaagctttttacccagagcaggttcacagtggcactccataaggatgcatcctaaaggggtttcaggggaagctgagaacagggaggtgccaggctagcagtactccattgggaagcatcctgaggaggtgttgaaagaaactggttaagtagagttgtccggccagtgacttttctctctgggtgccagtgtatgccattcaagggaatgtgtttaacaggtggcactggtggggatcccactctatgggcccgggaggaagcttccctgccagtggcactccactgcaaaactacctgagggaatgccaagggaagctggccatgagaacatgtcatatacttttagatactgggcactgcagaaaaagaaaaaaaacaacaacacaactgtgtgcattttgagagcctgatgcaagaaacataccagaaccagaacaagaacgccccttttctctattgtctttttggaaccctctgttacaaagggttgtgacacctggcaaagaataaatataggattcagttcgattattacagccagttattgcaaattggatatggaactaagagtcaataaattggtaactgacacacttggtaaatgcataggagcacagtcactgagtcatatgttatgtttgtatgtttctataagcaattgccaaactgctttccaaagcagttgcaccattcgcattcccaccagcaatacatgagtgtttcagttactccatatcatcaccaacgcttagtagtattgccctgcacttttttttttttttttttttttgagacagagtctctctctgttgcccaggctggagtgcaactgcaacctctgcctctcaggttcaagtgattctcctgcctcagcctcccaagtagctgggattacaggcgcctgccaccatgcccagctaatttttgtatttttagtagagatgaggtttcaccatgttggccaagctggtctcgaactcctgacctcaggtgatccacccacctcagcctcccaaagtgctgggattacaggggtgagcactgtgcccggcctgctctgtactttttgtagtgaatttgtagtgcatagtgtagaatggtgtagtgaacaatgaagttattgtagtgagtttgatgcaatatcactttgtggttttaattcacagtcctctgatggtgaaggatgtggatagttattttagttggccatttgtgtatctttttatgagaagtttctgttcaaatcttttgtccattacaaaagtgaattattggtttgtgttcttatagctgagtaagagtgtgtttgtgtgtatttgtgtgtatatgtgtgtttgcatgtgtgtgtatatatatatattctagatgtgggtgtacccccaaatatatgttacaaaagttttccctcagtctgtatcttgcctttgcattttgttcacaatgagtttcaaagagcagaattttaaaaacttgataaagtctaacatatttttaacactttgtgcttttctttcctatcgaagaaatctttacctaggtaacaaatattttctttcatgttttattctgtaagttttagtgtattagctttcacatttaggtctgtgatccatttcagattaattttttgtatgaagtgagataatacttgaggttcacatgtatgtgaatatgagtcctccccttaccccaagggatgctcaattgttctagcaacaattagctaaaaagtctttctatttcccattgaattagtttagatgctgtcaaaaatcaataggccgaatacgcttgatatgtttctggattctctaatttgtttcatgaacctatgttttatccttatgccagtaccatattgtcttgattacagcagctttatggtaaaatttgccatccaacagtttaagtcctcccaatatgtactttttcaaaacagtttttgctattttagcatttttttctttttttgcatttatatacacattttttctatatatatgttagaatcatataattaatatttacaaaagcatttgctgagattttgatttggattaagttgactctatagataaatttaaagagaactaacgtgaacaatcttagtcttatgattaatgaacattgtatgtttctctatttatttaggtctttctttccacagtgttttgtagctttcattgtacaagtacacatataaattgttaaatttatttgttaatcattcgtggtttatgatgctattttaaatggtatttaaacatttattttccaactatttgttgctagtatatagaaataagcttaatttttaaaatattgggattaaatcttgagtccttgttaaatatagttattgattctaaaaggtttcttctttctatttttttaaaggaggtctgtctttcttgtctgtatggtttttatctcttttctcaccttgctgctctagtgttgaatagaagtagtgagattggagttcttgtttttgttatccgatattgggggaaagcattctttcatcattaagtaggatgttagaagagtttttgatagatgcttcttctattgatagttttctgagagttttaaaatatgttttaatcaggaactctttttctgcatctactgagatgaatgtgttttaatatgttaatgcagtgaattacactgattgatttttgaatatgaaatcagccttacatctctaggataaatttttcttgattatggtatattatcccttttttgtttagtgctggattctatttccaagaacttttgaagattttatatctattttcatgaaagacatggatttgtagttttattggtttaatttgtctggttagactatcagggttatgctaaccttgtaaaatgaaatgagatttttttctctcatctccaggtttctaaaagattttatgtaggattggcattattttttacttaaatattagatagaattattcaataaagcaatccgagttcagaaacttttatggttcttgttcagatttgaataaagaattcaatatttaattgacataggagtattcataatgttttcaataaacctactttatttccatttatttttaactcctgtttttatctttttttccttctatctagttgagcttactttgctcttcttattctacaacattaatatgaaagcttacattattgattttggatctttgctcttttctgtcttgttttctaatttaaatccatgtctctcactgtaaacactgctttagctgtttatcacagaattttatatgttttactttcatttttattcagtttaatatgttttctaatctacatttacttggggatttccatgtgatttttttctattgatttctagtataactctgttgtggtcagatacatcttttgaatgattacagttcttttaaattaatcaagacttgtttatggtccatgctattatatctcttggtacacttttcatatacttgaagacaatttggattctactgtcattgggtgtacattttataaatgtcaattgggtaaatttattgataatgttaagaattatttatacttacagattgcctgtctgcttgttttttcaatcactgagagaagagtattgaattatccaattataattttacatttagctattttccttttcagttctgccagtttttgcctcttgttttttgaagttctgttattaggtgcatacaaatttataatttctatgccctcttgatcagttgactccattatcattgtgacatgcttctttttgtcctaattacattccttgtttcgaagtctaccttatctaatgttaaaaacagtattcttatgattacaatttttgtggtatatcttttttgtcatttccttataatgtatctataactttacattttaagtgggtttcttgtagacagcataaagttggatcctgctctttatttaaagaagtttgtcaatctctgcattttaattggagcatttaaacttttatctaatgttattatagatatatttcagttttaatctaccatatttctattaattttctatttgtctttcctcttttattctttttgtgacttcttttattttagttgtgtatttaaaaatattttgtgttattcttcattattagcttatgcattataacccttttttttttttatttttgagacggagtctcactctgtcgccaggctagagtccagtggcacaatctcgactcactgcaacctccacttctcaggttcaagtgattctcctgcctcagcctcctgagtagctgggactacaggcatgcaccaccacgcacagctaatttttgtatttttagtagagacggggttttaccatgttggccagaatggtctcaatctcttgacctcgtgatccgcccacctcagcctcccaaagcgctaggattacaggcatgagccaccgcgcctggctgatttacttttaagaagttgttctagggagctttgctcaatctgagtttgaaggcagaattaaactaataccctaaggcatctattgtatataatgaactattttctttcttatgtgcccaatatggagttatttattgaccatcctttggaaaataaataaaacagtcactcacatggttttctgtgcccagtggtccacatgagagcctagggttattatagatgatctaagaaagttggcaatatgcttatcatgtttaccttcaaataacattatacctcttcacacataagaaccccaacccacctatacttctacctgtcctctcctctccttttaaaagactgtatgttttgcttatatatatatgcaaatatatatatacatttattatatacataataaatgcatgttctttttttgctttaaatagtaaattttgttttaaagaaattaaaaattagaagcaatttattttatatttcctcatatgtttacaaattttcaagctcttcattctttttttgtggactcattttcattgattcttttctttctgtttgaagaactttctttaacgtatcctatagtgcatacccactggcattaaattctcccagccttttttttttctgaatgtgtttattttgctctcatttaaaaaatatattctctaggtataaaattctagattgtcagttttttcttcatcattttaaagtcatggctccaatgactgctgcacacatattggtgtctctgtaagtaatgtatcttatttttctctggatgcttttaagtatttatatttatcattaccctttggcaatttaaatatgaagtgtgtgatatacttttcttgtatttattccacttgagtttgctgaaattcttgcaagtaggtttatacttttcattaaatttattaaaattttagcttttgtaaaagtatttttccattttccccatctttcctctcctctggaactccatacctcctagttagacctcttagttttatgcttcaggtcattgagtttttgtttattgttttcctattttttctctctctgaactccatttggatattcttttttggatatgttttcaaatttactatttttaaattttcatttcatagtatctgatctgctcttaatatcatccaaagaaattgtttttcaaatattgttttttattgttagatatttcatttgattattttctacatttaatttctctctcatgtgtaaattttccttaatattaagaaatagttataatatctgcttttacattcttatttaagcagatattatattatattatattatattattctatcttttctgccatttcagggttggtttttattgactgatattttccctgggtaacatattttccagtttcttttccatttgtaatgatattttattagatattggaaattgtgaatgttacattgttgagtatcttgattttgttttgttcttttaaattatattgattatttttccccagctgttggttggttaactgcagcttagtttgatccttttgaagcttttaaagaagttttaatagaatgagtctcgagtagccctttttctagaggtagattagtcctactacttgcacagaacttctagatctttactgattactccaagtggtcaatgaggaatctctgctccatcagaactcaaatgtttcccatttctgggtgggctctaggaatagttgaactgacagccacctgattattccgtgttcaattttgtgtcatttcaccccgcataggtatgtcttaatattcagtggattcaagaagatttctgtaaatatttctggagcccccgctttttcctataactacctcttctctataactctactgcatatgttccagcctctggagtctgcttgaaatctgatctttgcgtccttgatttggtgaggactactgtgttctgcttgggatctattttccctctctgatgtacagaacgtggctctaggcagaaagccagggcaaacataaggctaacctcatttgcctgcagtcatagtgattgcagtcctgtatcatctctttttctaggtctgaaagtgtttttttgtatcttttcccagttttctttttgtttacagtgggagactacatgtgggctcattgtttcataactagatgcagaagtctcccaatttattaatttttgattgaagataaaactttttatgaccaaaatatgcctatctattgttttaggcactatctccctaataccacttgatggatgacattaataattgaaagatttactggtgaacatgcaatcaatgtgcaaggagatagagttttttaaattattttactttaagttctgggatacatgggcagaacgtgcaggtttgttacatgagtatacatgtgccatggtggtttgcggcacccatgaacccatcatctaggtttttgtcctaatgctcttcctctcttgccccacccccacaacaggccctggtgtgtcatgttcccctccctatgtccatgtgttctcattgttcaattcgcacttatgagtgagaatatgcagtgtttggttttctgttcttgtgttagtttgtgagaatgatggcctccagcttcatccatgtcccttcaaaggacatgaactcattcattgtatgactgcatagtattccatggtgtatatgtgccacattttctttatccagtctatcactggtgggcatttgggttggttgcaagtctttgctattgtaaatagtgctgcaataaacatatgtgtgcatgtgtctttatagtagaatgatttataatcctttgggtatatactcagtaaggggattgcttggtcaaatggtatttctagttcttgatccttgaggaatcaccacattgtcttccgcatggttgaactaacttacattccaaccaacagtcaatcaaaagcattgagatagagattcttaagcgtttgcttggcttggcctcaggaaagtcttaacactggcagtcccacagatatactccttccttcgaagtagccccacctcagtttaatgcaactgccttgtcagtggatagtgtcagatatcttggagttatccttgacttctgatcttgtctttgatggtacaattgaaattctgtcaattgtgtcatcaaaatagcatcttgtcccatttccattaccatcatgctggtgcctgttctagctccctaactgttttctctgggatttttcttacaacctgcacccacacctctccccagtttgatgttggcagagtagctaaaatactgctttaaaaatgtaagtcatatatagtaatgttctgttctaaactttaataattttttatcttacccagagtcaaaaccagattccttagaatagcctacaaggccctatacaaagtagtctcagttaatttctcttttcctggtactcattgcattccaggcatagtagtgcccttgatttttctcaaacacactaggcatgattccacctcaggaatgttttctgtgattccacctcttagcattactcttctctttacttttttatttttattttttagagccagggtcttgtagtttcaaaggtgactttaaataaaactttgctcatgttaagagaagcgatgtggatacctgatgcaaaaataaaaaacaaaccaggtgcagtggtgtgcacctgcagtcccagctactagggagcctgaggcaggtggctctcttgagcccaggagtttgaattcaggctggacaacatagcaagaccctgccttgtcacctattttttatcttgccttgaatgtattttttttcctgttttaatcattgtaacatctctgttgccaaaaacaccattgggcatacggtctaactccagatatatttgttggataagtgaatacttgaagtcagatatcttaatgactagttacttgtgccttctagactcagtatttctttgcctttggcaatgttgtacaagattccagattcctgatcttgactcctttttttttttttctctctagacttcacataggccaccatgttgccatgttctcttttttgcaggcaggttacataatacagatgactagcctggagctttcttttgtattcaaacatatatttctggctttgcacagttgttattttgtctgaacttcgaagttcccaaatagactcagggatctatctcttgtagtggcttatttctactgagaactaattttgtcatttgtggtttatttctgaaagtttcattctcaaatggcaacattaatttaaattccagggcaactcattgtagtccctaggaaccactttgaaagtgttaaaaatgagttcagttcagctgagaagatttaaattcatataatcagcgtttattccctgccacctccttattataaatggtggttaggtgtataggccaacccacaaaagcctattttattcacatgaagctgatctgtagttctaatactaccattgtacatacctgatttataatcttttttacacaagaaaatgtatcgaagttttaaacagccgtgatggctatttggctgcaagttccaacacattaatctacaaacatttttaaaacatagcttgatgacaagtttacatctacttggaaatatttcatcatcttggataaaatatgacattcgatgttgattaaatattgtatacagcaattggaaattagaaagtgttaagtagtcacatttagacttaattttatagttttttcatctatcttttatacaacattttggcccttcctttcagtctgtataccgtattttcctcttttctgtctatatcttctggttagtaaatcacatattgagactgactgttttagcatttaaaagtttagcaattttgttaaacaaaaagacagaaaatttactgctgaatggcaagggaccattctggtggcctttgttttgttttaatagggtggttgagagaaaaaaagatgcagttcagctctgaaccattctgtaatagaccattattaagagagatgggaagagggagccctttacttccatttcagagatgtttgcacttggaagtatatgaattcttatgttttcttcggagctgtttgaactttattatataatgtacacattggcatccaattattcaccttcagatatttgtgtgttgcccaaatattctagcacaaatgctagaagtgcctagcatttctcaaactgacacctatgggttccctggatctttgagaacttatttttggttatccatgagtacagtaataatgtttagattttctatttcattatataaaataattgatataagatattctagattatctagatgccccttttgcactggtttacatttacattggaacaaagtaaaggtcaattgatatcacaaaaactaatgcagagtttagtcttagtttaaattgagaaaatagttgggagaattgaacaagcataagactctggtacaaagatgtaaaatacaaaagaatatgcatcatgccacatttaccttttaggtgaatgtattgagtaattaggtagataccatctttgtataaattacaacacttctttcttttgttttgcaaagttatgaaaatattttcattaatgatattttaaaatttggtattcagttttgttgtagaaagatgtggaccgtcatataaaatgaacgattggtcgtcaaaagcgagcttgctgtaaaaaaaggaaaataacaaaaattaattaatggtcaatatatgctcaaaacaacaatgattagaccaatggtaactgacatacaatgtacaaatactgtagataaatacagctttccactaccatactcattgttggcaactatcttttagaaaaaaacattatatatcacattaaattaatgaagttaaattaattgcttgttaagaaatttctccactcttcttatttccctatagagagatacacattagaaaaacacctctgacatcttgccctacccctcgtttttgcccatgcaggagtagtgaattgtgtggttggaagatgaaaaccactgatctatgttctttgattgggtagagctaatctggtgaaacactgtaggcattatgaattaaaactctctctctgttttttaaaatttttctttaagttcttggatacatgtgcagaacatgcaggttagttacataggtatacatttgccatggtggtttgctgcacctatcaacctgtcatctaggttttaagctccacatgcattagctatttgtcataatactctccctcccctcaccgctcaccctctgacagctctggtgtgtgatgttcccctccctgtgtccatgtgttctcattgttcaactcccacttgtgagtgagaacatgcagtgtttagttttctgttcctgtgttagtttgctgagaaggatggtttccagcttgatcatgcccttgcaaaggacatgaactcatccttttttatggctgcatagtattccatggtgtacatgtgccacattttctttatccaatctatcactgatgggcatttgggttggttcgaagtctttgctattgtgaacagtgctgcaataaacatacgtgtgcatgtgtctttatagtagaatgatatataatcctttgggtatatacccagtaatgggattgctgggtcaaatggtatttctagttctagatccttgaggaattgccacactgtcttccacaatggttgaactaatttacactccctccaacaatgtaaaagctttcctatttctccacatcctctccagcacctgttgtttcctgactttttaatgatcactattgtaactgtcatgagatgttatctcattgtggttttgatttgcattcctctaatgaccagtgaagataagctctttttcatatgtttgttggctgcaaaaatgtcttcttttgagaaatgtctgttcatatccttcacccactttttgatggggacatttgtttttttcttgtaaatttgtttaaattctttgtagattctggatcttagccctttgtcagatggatagattgcaaaaattttctcccattctgtaggttgcctgttcagtctgatgatagtttcttttgctgtgcagaagtgttttagtttaattagatcccttttgtcaatgttgacttttgttgcaattgcttttggtgttttagtcttgaagtctttgcccttgcctaggtcctgaacggtattgcctaggttttcttctatggtttttatggtttggggttttacatttaaatctttaatccatcttgagttaatttttgtatgaggtataaggaaggagtgcagtttctctcttctgcatacagctagtgagttttctcagcaccatttattaaatagagaatcctttctccattgcttgtttttgccaggtttgttgatgatcagatggctgtagatgtgtggtgttatttctgaggtctcttttctgttccactggtctttatatctgttttggtaccagtaccatgctgttttggttactgtagccttgtagttagtttgaagtcaggtagtgtgatgcctctagctttgttctttttgcttaggattgtcttagctatacaggctcttttttggttccatacaaaatttaaagtagtttttttctaattctgcaatgaaggtcaatggtagcttgatgggaataggattctatctctaaattactttgggccataaggccattttcatgatattgatttttcctatccatgagagtggaatatttttccatttgtttgtgtcctcttttgtttcctggagcagtggtttgcagttcttcttgaagaggtccttcatatctcttgtaagttgtattcctaggtattttattctctttgtagcaattgtgaatgggagttcactcatgatttggctctctgcttgcctattattggtgcataagaatgcttatgatttttgcacattgatttttgtatcctgagatgtttctgatgttgcttatcagcttaaggagtttttgggctgaaatgatgggttttctaaatatagaataatgtcatctgcaaacagagactgtttgactaccccccttcctatttcaataagctttatttctttctcttgcttgattgacctgcccagaacttccaatactatattgaattgtagtggtgagagagggcatccttgtcttataccagttttcaaagggaatgcttccatcttttgcccattcagtatgatattggctatgggtttgtcataaatagctcttattattttgagatatgttccatcaatacctagtttatagagagtttttagcatgaaagggtgttgaattttattgcaggcttttcctgcatctattgagataataatatggtttttgttattatttctatttatgtgatggattacatttattgatttgcatatgttgaaccagccttgcatcctagggatgaagctgacttgatcgtggtagataagctttttgatgtgcaactggattcggtttgccagtattttattgaggatttttgcatcaatgttcatcagggatattggcctgaaattttctttttttgttgcgtttctgccaggttttgttatcagggtgatgctggcctcataaaatgagttagggaggagtccctctttttttgttgtttggaatagtttcagaaggaatggtactagctcctctttgtacctctggtagcatttagctgtgaatccgtctggtcctggacctttttttggttggtatgctattaattactgcctcaatttcagagcttgttattggtctattcagggattcggcttcttcctggtttaatcttgagagggtgtatgtgtccaggaattaatacatttcttctagattttctagtttatttgcatagaggtgtttatagtattctttgatggtagtttgtatttctgagggatcagtggtgatacatccttcatcattttttattgtgtctatttgattcttctctcttttcttattattctgtgtagtggtctatctattttgttaatgttttcaaaaaaccagctcctggattcattgattttttggagggtttttgtgtctctgtcttcttcagttctgtttgctcttccttctctagtttttttaattgtgatgttagggtgtcaatttcatatctttccagttttctgatgtgggcacatttagtgctataaatttccctcttaacactgctttagctgtgtctcagaggttctggtatgttgtctctttgttctcactgttttcaaataacttctttatttcttccttaatttcattatctacccagttgtcattcaggagcaggttgttcagtttccatgtagttgtgcagtttttttgtgagtttcttaatgctgagttctaatttgatggcactgtggtctgagagactgtatgttatgatttatgttctctagcatttgctgaggagtgctttacttccaattatatggttaattttagaataagtgcgatgtgttgctgagaagaatgtatattctgttgatttgggatggagagttctgtagatgtgtattagatatgcttcttccagagctgagttcaagtcctgaatatgcttgctaattttctgtcttgttgatctgtgtaatattgacagtggggtgttaaagtctcccactattattgtgtgggagtctaagtctctttgtaggtctctaagaacttgttttatgaatctgggtgctcctgtattcagtgcatgcatatttaggatagttagctcttcttgttgcattgatccctttaccattacgtaatgcgtttctttctcttttttgatctttgtcagttaaagtctgttttatcagagactaggattgcaacccctgcttttttggctttccatttgcttggtaaatattcctccttctctttattttgagcccatgtatgtctttgccacgaaatgggtctcctgaatgcagcacactgatgggtctttatccaatttgccagtctgtgtcttttaattggggcttttagcctatatacatttaagattaatattattatgtgtgaatttgagccccatatttcttggaggctttgttcattccctttcattctttttactgtaatcttgtctttataccttatttcagtaagttgatcttcaatctctgatattcttccttctgcttgatcaattcaggtattgatacttgtgtatgcttcacgaagttcttgtgctgtgtttttcagctccaccgagtcatttatgttcttctctaaactggttattctagttagcagttcctgtaaccttttatcaaagttcatagcttccttgccttgggttagaacatgctcctttagctcagaggagtttgttattacccaccttttgaagcctacttctgtcaattcttcaatctcattctccatccagttttgtgcccttgctggagaggagttgcgatcatttggagaagaggcattctggtttttggaattttcagcatttttgccctggtttttcctcatctttgttgatttatctacctttgatctttgaggctgatgacctttggatgggtttttgtgcgggggtcctttatgttgatgttgatgtttatgttgctttctgtttgttagtttttcttctaacagtcaggccccctcttctgcaggtctgctgcaatttgctgaagctccactccagaccctgttcacctgggtattaccagtggaggctgcagaacagtaaagattgctgcctgctccttactctggaagcttcatcccagaggggcaccagcctgatgccagctggaactctcctgtatgaagtgtctgtcgacccctgttgggaggtctctcccagttaggaggcacggggttcagggatccactctaggaggcagtcagtcccttagcagagctcaaacaccgtgctgggagaatccacctcatcagtatcagctgctctcctcagagcccacaggcaggaacgtttaagtccactgaagctgcgcccacaaccgccccttcccccaggagccatgtcccagggagatgggagttttatctataagcccctgtatggggctgctgcctttccttcagagatgcactgcccagtgaggaggaatctagagaggcagtctgcccacagctgctttgccatgctgtggtgagttctgcctagtccaaacctaccagcctccttagcactgtcaggggaaaaccgcctactcaagcctcagtaatggcggatgtccttccccacaccaagctctatggtcccaggtagacttcagagtgctgtgccgttagtgagaatttcaagccagtggttcttagctagatgggctctgtgggagtgggacccgctgagtgagaccacttggctccctgtcttcagccccctttccagggaagtgaattgctctgtcttgctggggttccaggtgcctctggggggtggcggggaggggaggggaggaacaaaactcctgcagctagcttagtgtctgcccaaacagctgcccagttttttgcttgaaacccagggccctggtggtgtaggcacatgaggtaatctcctgatctgcagattgcaaaaactatgggaaaagcgtgctaggtgggcccaatagcacagtccctcacggcttcctttggctgaggtagggaggtccctggctgtttgcatttcccaggtgaggcatgccccactctgcttctgctcttcctccgtgggctgcacccattgcctaaacagtcccaatgagatgaactgggtacctcagttggaaatgcagaaatcacgcaacttctttgttggtctccctgggagctcagactggagccgtttttattcggccatcttgccagatcctcctgaattcagtccctctctgatacagtctttctctctgtctccctctctccctccatcccaactccaccacccccactccttgaaactagtacaaagctctgatcctgtgtgaattgtagctgctctgtagacctaaactttctataagtaggctgtcccaagatttggactcggacaggttatcctcacaccaagccatgttcttcaacagctttatcagtatgaaagatgatattttgctctccacttgtctctttcatttgattagttccaatcttgggaaagggaggggttaatcattattgagcctctaaaactccaactttttttttattttgtaaatttgccttagttttatggttatatgggcactagatgcaaataattgtatttatttttatgttacataaatgtaagtacaattataatgaaaataatttaagccaacaccaaaaacccctgaacatgtttttcttttaatatgcatccatataacatgtaagtaggagaaaatttgaggcagcagaattgtcactaacacactcaaactcaatcaaaataaagattaaagcaatttccccagaaacttttaaaaaaataaagtcagcaacaacaacaattttacaatatggtaatgatgataagtggtttttgaatttccctgtattcaccacaaaaagtgaaaaagaaactttttttttgcttttagacaatatgtgtgacaaaactaactgacaaaatatgaatcctaaaatattactaggtcacgtaaagctaccaacagcaataatacctgcatcatagcaacctctagatatgactacccatttcctggaaagacaacagaggaacatgttatacctctctatagaaatgcagtcagcatattccagtcaatgggaagaaccctgctggagaaatggtatctttaacacataactaaaagagtaaaaaaggattgattagagagacttccagggaatattggcatattgagcagctgcaatgtatgactcatatttgaatcttgactaaaattataaaaattgtaagaaaagttagaaaacgtgaatataactgagtgtttgctttattaatcaaaactttttttgatgtgataatggtattgtggtgttttaacaaagaatttctaacttttagaggtgtttaatgaaatatttacatgtaaaataatatggtgccttgaaaggaggatataaaatgaggtatagatggaataagactgataacaagtaaataattattgaagctggattattgaggtacattatagtattctctttagtgtggaatatgtctgaaatttcctataataaaaattttaaaagccccttaggaacacaaagggacatttaaatgagacgataaggaccaaatgatggactattagacttcaaaaaaagtgttttcatagttcaaagaaaaggaagtccaaataagattttgaaatcctaggtatctagtaaaattatttccaattctgttcaaatattaggtgtccctaacaatctacaataacaggtaagagcaaagttatttcttttaactttggaatgtatttccttcttacagttaaaaaggcttatctgatagattgacaatttccctaaacatttatcaaatcatagctttacaatacgtgtggctgagaatgattcactttagcccttttgggagctggggcatctgagctcctgagctaagacttccagcctctagctgtgtgcagccttgtcttttttatcttaatgaactatacagatattgtcatttctaaatccctgttatgccctaaaaatgcatgggaagcactagactatactataaatctgacttgtgattccctctacttaggaactattctctatgccctacatcattgttcagaaggttagtgtcttttcccaaacagagatacacacttcagatagaagcagatgccaatctgtcaactaacatgtatttattgatttcccagacacagtgggaagggaagatacatacttgatcttaccatctgttctctctaaaaatccctttatttctccactggctttgatattacagagtcactagtgcactcgagagtctacggtcagttaatagacatttaatgagtggataacaaatatctgtctaagtgttggattctagagctcaagaggtaaatatgtaagacatggttcttgctatccttttcttagttctcagtctctttgctctcattgctaactttgacaccaatgaactctaccttgtagaaactttctaattcttaagtttccagatggctccctatgctctctctgctccaagctgattgcatcattctaaaaattcactgattgatgctgcctctgatgaaatataggcatttctatcatcatctctcatttatttaacagtattgatattactactatgttccgggctcagggaacccatccgtccagcaggagacagagactgctaaagactagtaaagtacaagaaagcgcaattaattgagagagttctgaaggacactgtctggtgctagggaggcacttcatagagaatgtgaaaattagccagagtttcaaaggatgacatactgagttgagttgacgttttatttccactgttcctccttcttccatatagctgggattagccatagagcattcacctatttattcattcattgaataaatacttatcaagcaccaactatgtgagagggactctgctaggcagattcagcaggtggatggtcaccaaactggcaaagggactgtatagcagggggcccccaacccccaggctgcagaccagtagtggtctgtggcctgttaggaattgggccacgcagccgcaggtgagctgtggctgagccagcgagcattaccgcctgaactctgcctcctgtcagatcagaggtggcattaggttttcataggagtgcaaaccctcttgttaactgtgcatgcgagggatctaggttgcacactttttatgagaatctaactaatgcctgatgatctgatgtggaacagtttcatcctgaaaccacctccctcccaccaccccgtctgtggaaaaattgtcttccacaaaactggtccctggtgtcaaaaaggttggggaccactgccctatagggaatacagataatctgggtcagtgacagggagtcactaatacaggatcagtccagacagaggaatgggaaatctagtctgattcttggaagatattgtatcctcaggaatttgtgacagttgtataatcagacaattttggaagtgtaggcatgtaatgcagttaaatcattgtccgtttcagatacaatctatcccatttacattagttcacatctcaaatatgttatcttgagcaaagttatccattctgtgtccttgtttccatatttgtaaaatgaaataaaggatagctaccctgtaagttcttgagggatattaaatataatttatatcattcaagaatttttgtcacctgaaagtgctcaataaatgcaattgtttaaagttatgggattttgaactaatattgttgtagcatttcctgaaaggatgaaacagcaaggtatgtgtgtatgtatcagtgtgtgtgtattatagacacaaggtgtacaagacttcacagactgtcacagaaagaattactttgtgaactactgatagtaattaatcatcatgaatttaaatattagttgtcagttctcaatgacaagaatagcattcaggagggttagaattccactctgtttttctgagagggaggctggatggtttgcgtacatttgttagtagctgagtaaaattcaccccttataatctgtgaggtgatctttgtattagtctatttgctttaatttttactgaccagagtgctcgaaaaagctgcacttattacttggctataccatgttttttttttttttttaaatggcacttttgtatcttttagtaggaaagatgaaatttcagtttattttggtttgtaacttgtaacttttttcatcaactaacagaaatcctctcataaggcaattatagcctttagtcattattgccataacttccactgctttcattagagatggtgaaaaatatgagtgtggttgtggaaagggtttgagaactaagacagctcacatatgtcataagattaattttagactagatattttttccattcaatgctcacttactttctccattttttacagtatcttgctaagatttaaaatatccaagagattttcacccagagagtattgtttcccaagagggttagttcttatgcatttatattctccaagctgaataaattgcagagctaggccaagaaatgtgtaaaaggtttgcataacctaaccatgtctccagaaataacatattcattcttagatgttatttttgtctttaaatcatgtctggatgctcacaacagcactattgagcataaagtgtatcatttctccagtctttcattaatcccccctttgcttccttgctaccagccaaaaaacaaaccaggaaacaaacacactaactaaaccaaaattttaaagaataggaaggccaaaaattactttctgcttaacatacatcaaaattattgaggtttttttgaggtctcattgtaaaaatgagataaaaacaaacaaattaatacctttccatctgtgtgcattgatggcactccttaataaaaagtctttgtgactaacaagaaaattagcaaaagagttataatacagtattcgtctttcaaatcaccaagaaccaaagtttttagtgagaagagggttacaaccttttttcccatgtgcattggatcctttaagtaaattatcagcagtacgacaaatatcttattattactatatgggtgtgaccaagcctgttcttgtttaatttagagctaagcaggatagagtatcagagagtatagtaatagatagcaacatgctgtgacttaggtaggtccaggtaatattagtagtaattttaatggtctaaaagctaggtagataagaatgagagtatctgagtcaagagagttagacaccaaattacaagtgccaaaattagaggaagaatcggtaagactgaagtctaagggcagcacttcagccccagggtatgatcaacattggaatcttgggcagaatatttagatccagggacaggggatgatgacagggacctagttaacagaaccggaattcaaggtagagatttgcttctaaggacaagatagatacttggctattagggtgagtcctagagtcagaatccttcaaatgatgatttaatttgatctatttgaagtatgctttaaatctcttcatgactaaggtcagaattgatccaggaccttggagtgctagagcagggcttgcaagtgagagttaagatgtaaacttttcccatttattcttcattccctagtgacacatagttcctttttctctaatctgaactagtctgttagtttaactgttgacttaacttacagcatggattaaagacaggaattctagtattaaacagatgcccttactagctttgggacccaggttagcttattcaacttctcgaagcctctgtttccttatctacaaaatgcaaataagaaaattatttcacagcattattgttagcattgatgtaaaacacttggcataatgcctggcacatagctaattagaatttgtactttatttttatttctaactaactaccagctatgaaaagaagacttcagttgcctgaaaggttgatacttaggcacaagttgacacacaactttccatcgtctgaccatgaattgtgcaggctgctccttctgcctctttcattgtgtctgtctgcctggctgacttgtgtgacagtcccataataattaccaataaaaatcatgtaataatgcttgccaagaagtataatacatgaaattctatctctagatgtctacttaatatattaatcaatttcacctaagctttgaatatgattttcaactcttgaatacaatataatatggagtgctttttttgatggatgtgattcttttgtgaaaacttaagcattgtaccaagaataagatgtgaatgtgtttttttaaagagtaggtgaagctaaaaattgtgctctaatggttactattttggtttcatgcatgattttatggcaaaaacctacataaattgtgtataagttattcaatttcttcctttgggcttatcaaactcacaggtttttccccaaatttatgtgtgcagatatagtcatatttcaggaaatgtgaagttttaaaaattttcttcctgactgctcaccaaattacttagattttttcctgaaatcattctcaggaaagtggtcacatttacgagtgataaaattacatgtgcaatttattgaataattgttaataattaatgacaaataatgaactgcagtcaggagacagattctggcctcaaataatttacagttcttaaaattatgagtagatacttctcggtagggtccatgtttcagttgacactgggctcactctgagaacaggaagtaatcagattacagtgatggtttaacgctatcttacttagaacttagatcaaagagttacagcagctttataatcctcagcactcaatgaatagattgccaaagtaaatctcagtttgtttaatgtctagtgaagcagaggaaaaagcagctattaagcatcacaatttttaaaggaggacagaatgacagtgttaatggatgtggaattttctctgtcctcagtcagcatgcttcattgaatacttatggaatgaaaagtacttggtgcaaactactgtacactaagcgttgtggtgggatataaaaaaggtataataaaggcatttgtgtaggacattgcaggtaaagaaaattctttcacatatatcatctcatgtgatattcacaacttccatgtgaggaaagaatatagaggttatcattttttcccactttactgataaaacgactgaggattttgagattaatgatttattcaatgacctgcagagctagcattggatccacatcttcatatgcaaataaatattcattcattcaaacatattaatctagggactactatgtgccgagtactggtgctatgccaaaacaaaaagcccctgcttttccagagctcatattccacacggggaggtaaaactataacaatttcaagtaaaaaatgctgggctgtggagggatggtgcagatgtaagtaaagcgtactgacaattcagaaaaggaagtccttttactctggcaagaaagatagggatgtctgctagattttgaagttgtgtgtagtgggagttcttcaaagggaagttgggactggctcaagcacaagatagaactcgggaagtaagatgagtaggggcagcaatgaaacgtgacgggaaagaaaggttggggattatgtcccaaagagccagatacatttgtttgaactttctgtggtagggatcactgaatatttttaggtatcagaatgatcaccagaaaataagaccaagatggtagagtgtgatatgtagatataaagtgtgagattggagacaagagccagttttttaaggaccagttggtttaaagcttttatcttctacaattatgttgtacaatgcagttattacaataatcatcacatactttcctcagttacttctttgaaatataaaaaagacatttaaaaatgtttgggaaattaatgaagaatttaataaaaagtaacccttttagttgagtatatggaatgaacaattctctggttaccaagatcattgtctaagaccaacattttatgaaaacgtggaattctacatatatgtgttagggcttgaaatatatttcataaatagaggtagagatttttaaaacaattctgattattttccttatctatagtttgttcaaacacattctttgaaagatttttttcggcttaggattgacttggtgatgcgggctcttttttggttccatatgaactttaaagtagttttttccaattctgtgaagaaagtcattggtagcttgatggggatggcattgaatctgtaaattaccttgggcagtatggccattttcacgatattgattcttcctacccatgagcacggaatgttcttccatttgtttgtatcctcttttatttccttgagcagtggtttgtagttctccttgaagaggtccttcacatcccttgtaagttagattcctaggtattttattctctttgaagcaattgtgaatgggagttcactcatgatttggctctctgtttgtctgttgttggtgtataagaatgcttgtgatttttgtacattgattttgtatcctgagactttgctgaagttgctgatcagcttaaggagattttgggctgagacaatggggttttctagatatacaatcatgtcgtctgcaaacagggagaatttgacttcctcttttcctaattgaataccctttatttctttctcctgcctaattgccctggccagaacttccaacactatgttgaataggagtggtgagagagggcatccctgtcttgtgccagttttcaaagaacaaagctggaggcatcacactacctgacttcaaactctactacaaggctacagtaaccaaaacagcacggtactggtaccaaaacagagatatagatcaatggaacagaacacagccctcagaaataacgccgcatacctacaactatctgatctttgacaaacctgagaaaaacaagcaatggggaaaggattccctatttaataaatggtgctgggaaaactggctagccatatgtagaaagctgaaactggatcccttccttacaccttatacaaaaatcaattcaagatggattaaagatttaaacgttagacctaaaaccataaaaaccctagaagaaaacctaggctaatattaccattcaggacataggcatgggcaaggacttcatgtccaaaacaccaaaagcaatggcaacaaaagccaaaattgacaaatgggatctaattaaaccaaagagcttctgcacagcaaaagaaactaccatcagagtgaacaggcaacctacaaaatgggagaaaattttcgcaacctactcatctgacaaagggctaatatccagaatctacaatgaactcaaacaaatgtacaagaaaaaaacaaacaaccccatcaaaaagtgggcgaaggacatgaacagaaacttctcaaaagaagacatttatgcagccaaaaaacacatgaaaaaatgctcatcatcactagccatcagagaaatgcaaatcaaaaccactatgagataccatctcacaccagttagaatggcaatcattaaaaagtcaggaaacaacaggtgctggagaggatgtggagaagtaggaacacttttacactgttggtgggactgtaaactagttcaaccattgtggaagtcagtgtggcgattcctcagggatctagaactagaaataccatttgacccagccatcccattactgggtatatacccaaatgactataaatcatgctgctataaagacacatgcacacatatgtttattgcggcattattcacaatagcaaagacttggaaccaacccaaatgtccaacaatgatagactggattaagaaaatgtggcacatatacaccatggaatactatgcagccataaaaaatgatgagttcatgtcctttgtagggacctggatgaaattggaaatcatcattctcagtaaactattgcaagaacaaaaaagcaaacaccgcatattctcactcataggtgggaactgaacaatgagatcacatggacacaggaaggggaacatcacactctggggactgtggtggggtggggggaggggggagggatagcattgggaggtatacctaatgttggatgacgagttattgggtgcagcgcaccagcatggtacatgtatacatatgtaactaacctgcacaatgtgcacatgtaccctaaaacttaaagtataattaaaaaaaaaatggggaaaaaaaaagaaagatttttttcttcatattgtactctcatcttcattcaattgctttatttattttcatggatagtcaaagtagttcaaaaattgatataaggttgtgggggcggaagtttttttagaatttaaagaacagtgcagatgaaaggagttttattacatatcctaaatcttaatttttagcctgaatcacttaataattactttataataatcaaattattttatattttctcactactcaccaatagattcacggtatgctttttattataaacatttctgtgtataatttaatgcttgtcaatacttacagaaattcaatgaactgaaatattgtccctaaaaagttgtcagtatctgtttttctggattgtaaagtttataaatatgatagcacacaatggagcaatacttaatattttgtcaaatagttaaaacaaatatatatatacatattacatgtacatacatacatatgtgtatgaagttttatttttagagttaaatttgttaaattagaaacataaaatggaaatattattgtatttagtagtaaatctttttatataggtgtcagtgagtgtttaaattcttcggagttctcattagtaaattatttaaattattggtggccagagttccccaaatatatggtctaacagctgttgattaataaattttcataatttatgacacattgtatgtatatagaattattaataactgttacttataatcatacaatatgaaatatttccgtggttggaaaatatagcctgaaagtgtgtttctgtccattttcaaattagtgtgatcattcataattgctacaaaaaaataaaatatctagaaatacaacttacaagggacgtgaagaaggacctcttcaaggagaactacaaaccactgctcaaggaattaagagaggacacaagcaaatggaaaaagagtccatgctcgtggataggatgaatcaatatcatgaaaatggccatactgcccaaagtaatttatagattgaatgcaatcaccaccatgctaccattgactttcttcacagaactagaaaaaaactgttttaaatttcatatggaaccaaaaaagagcctgtatagccaagacaatactaagcaaaaagaacagctggaggcatcatgctacctaacttcaaactatactacaaggctacagtaaccaaaacagcatggtactggtaccaaaacagacatatagaccaatgggacagaacagaggactcagaaataacaccacacatctaaaaccatctcatctttgacaaactttgacacaaacaagcaatgaggaaatgattctctatttaataaatggtgctgggggccgggtgcagtggctcacgcctgtaatcccagcactttgggaggctgagatgggcggatcatgaggtcaggagattgagaccatcctggctaacacggtgaaactccatctctactaaaaatacaaagaattagctgggcgtggtggcaggcgcctgtagtcccagctacttgggaggctgaggcaggagaatggcatgaccctgggaggcagagtttgcagtgagccaagatcatgccactgtaccccagcctgggcgatagagcaagactctgtctaaaaaataaataaataaataaataaataaataaataaataaatagtgctgggaaaactgactagtcatatgcagaaaatagaaactggacccattccttacaccctatacaaaaattaactcaagatggattaaagacttaaacataaaacctaaaaccataaaaaccctagaagaaaacctaggtaataccattcaggacataggcaagggcaaagatttcatgactaaaacaccaaaagcaattgcgacaaaagccaaaattgacaaatggcatctaattaaactaaagaggttctgcacagcaaaagaaactatcatcagagctaataggcagcctacagaatgggcaaaaatgtttgcaatctattcatctgagaaaggtccaatatccagaatctacaagtaaaataaacaaatttacaagaaaaaaaaaacaacctatcaaaaagtgggcaaaggatatgaacagacatttatcaaaagaagacatttatgcagccaacaaacatgaaaaaagctcattatcattggtcattagataaatgcaaatcaaaaccacagtgagataacatctcatgccagttagaatggtgaccattaaaaagtcaggaaacaacagatgctggagaggatgtggagaaataggaacacttttacattgttggagggagtgtaaattagttcaaccattatggaagacagtgtggcaattcctcaaggatctagaaccagaaatatcatttgacccagcaatcccattactgggtatgtacccaaaggattatatatcattctactataaagacacatgcacacttatgtttattgctgcactatttacaattgcaaatacttggaacccacccaaatgcccatcaatgttagactggataaagaaaatgtggcacatatacgtcatggaatactatgcagccataaaaaaggatgagttcatgtcctttgcagggacgtggatgaagctggaaactatcatcctcagcaaattaactcaggaacagaaaaccaaacactgcatgttctcactcatgagtgagagttgaacaatgagaacacatggacacagggaggggaacatcacacaccagagcctgttggggagtcgggggaaaggggagggagagcattaggacaaatacctaaggcatgtggggcttaaaacctagatgacaggttgataggtgcagcacaccactatggcacatgtatacctatgtaactaacctgcatgttaagcacatgtatccccaaagttaaagtaaaataaaaaaaattataaagacaatatgaaaacttttggaacatacttaaataatgagagtattttttgagtgctatgatgtgccaggtattatctaaagtctttacatagttatcttgatgtctactttatgcaaaattttattcccagtttagaaatgaagaaactgagacacagaaaggtcacaccctggtttcttccctccttttaccctctagactcccactggtgattttattggctgaactcaggagttagctgtcaggggtgcctgagatatgcagtagtcaaaattcttcctcccaggccataaaatacaaacccaaagcagggaagggaaaagagtgggtcccagggaaaacaggcccagaactaacagataactactgtgtagcaggtgcaggtatgtgctattttttttctgatatttataagattttgtatgaaattttacttggtcatttctttgttttaaaaatgttaagctcctgctaagtaattgtgactgaaatatatataaaataaacagaccagtagaagaagagacaagttcataaataaataacatataaaacataattctataaggtaaatatgtataaaatgtattatagaaaaatatgagaagagatttaatttggactggaggaatcagaagtctagaaaagctaagaaaaagaatgtgacgtgagctgggttttgaaagaaataggaaactagaacccagttaggtaggcatttaggcacaggctaaacataaataaaagcatgaaaactacaacgggaattgtatatcaggcacaatgacttgcctgtatagctgtagtacaaggaatatggaagaaagtggaaagataattgttcactgcatgagctcaaagtcatttatacatttgaactgtattcctaaccaaacttaagggctgtttacttcccagatttctgaagattggttgtatccatctttctcttctcattgtttgcacagaccagcatagtgttaatgctgttcttggtctatgtatcattccttcatcatataaggaccttggaattacaaaggaaaaatgcagttggcttgccttccccaaaacatctgtatttgctgcttcccaaaacattaatatgcatcatggttactacaagacttgcaaaggtgatgctgatgtgtctgtgtctggcttgttactgtttgtaccttcatttgctagatttgaagtctggccagggaaataatgtgggcaattgctcaagctatgctgcttcagcttccctttaatacctggtcaagagcagtctccagtgatgctgggtactctgaacacctctgctgcttcatgacgagtaaggactcagaatttagacaagggtgattcataccaggcctgagtaggtggccatcaatgtaatataaatcttttaaagtagaaaagtatttccatgcttatgctggtcatgctgctcactccttcagatccattctctgctgttctctgtgctgtaggaggttgatctctctaggacctcttgttatggtctgaatgtgggtgtccccacatcaacattcacatgctgaaatcctaatcctcaaggtgatggtattaggaggttggcctttgggagatgattaggtgatgaggatgcagcccttatgcatgagattaatgccttcataaaagtgaccccagagggacccctcgccccttctgctatatgaggacatggtgaaaaagcactatttgtgaatgaggacgggatccctcagcagacaccggatctaccagtgctttgatcttggacgtgccagccttcagaacagtgggaaataaatttgtgttgttaataagctacccagtctatggtattttattacagcaacctgagcagacaaagacagtgctcccttgatctttggactgcatttgatttttgcctatgggaagcagtaatagaagaagccagggaaaatgaagagtaattgaggtatttcttacctctctttctccttcctaggccacagtgtttgcagagcctattttcctttaattactgtgagataatgaggcgaccccctcattgctgacttcagcttttgtcagctttcagtagcactgtacctttccttgccctgcaggcctagggatggtaacaactcctcattgtgactagtccttgggtgcttcaccattccttgtcagtttccataaccctgcctgtacctctataaaatgtcccttcattcagtgctcttaaattaaatcctttgagtgcattctttgtttctcttctgcatgctagactacaccatgcagactcctcctttttcaggacagttggatggctcagatctctcaggaatttcccttagtcattttccctcaccaaagtcctgttcactttctgggcagcctgcattcagttactgatcattgtggaggtataaaaggcctggtttgcttggaccctggctggggcagccatggggttcattgtgactgttgttgagactgtggttggcaccaaaacctagcatctccgcctgccagacctgcttcctgtcctcacttccacagatgcagatcctgagagtactccctaataattttctggaatgcttacctcagtttcataatctacttcccagaaagagcaatttacaaacaccatttctttaaaagcacgtgtgctggctgattgttataaagattaattgtcttctcttgtctataattgccaatacgacccacaatgggcatagttttgcttttgtgccttctcagttccctttcctgggatcctttatggtcttatactcttatgctaatctgtactcttaaaaaattatctaaacacactaattaaagcaaccttaagttaccaatttatgcttgctaaatcagcaaacatttaaaaatattatagcctccagtattgttaaagttggtatggcacagatacatttatacagtgctaatggcattataaaccaaaataactcttgagaaagattgcatgacattatatatcattatgctatttgatctaataagtgctttcctgagaatttgttcttcaacaattaaaaggaagagcaaatctacctgtacaagttatcatctgttttgcaagaaaagaccaccactcaatatctgaaataaaatactgaatttattaatattttaagcaagggaaagccttgcttgtgaggctcagcctttctgagcaaagcatgaagctgattttatatgggtttttggcagtgtggagtccagaaatttgaagttcttctgagatgtcactgtttagtgattggctgacccttagttgtaggagcatggttaccagtgtgcatctgttgctgactttaaaaacgcaattactaaactgaagctgtttccaactggctgactttcagaattctgagctgtcactgactaggtttcagaaacatgtttattgaagtgaattgtcattgattgattatgtaaatttaaactcagctgggttgttacttattataatacctagcaaataactagtcttctcacagaagtgtaagaactttttttctcaacagcatattctctaatatgaacctggatataatctcaatgtctaatatgcaaatggttaagtaattatggtgaagacataatggaatattatgcagtcaataaccattattaatgttgcatagctgcatagtaaaagatttataatgtaagggtacatttaaaaaagattttaaatagaattttcttgtttatggcaactatttgaaaaatatgtgtgtgtgtgtgtgtgtgtgtgtgtacagggatcaattcatagaatgatgaataatgcttaatgttttacatgtttttatattttatatgtatatatgtgtgtgaacacaaacatgttttaaaataaagattaaaaaagcaatttaataattcaacagataacaggaaggtttgaattttagtaggagatgttgaagaccaatatgcctttaagacacaaatgaactcatctcattagaggccataaaagtggaagaagcactgaacttggaatttatgtcttcatttgaatctttcctgcatcacattattatttatctgaccttgggcgaaccatttgtcctttgtgagcttcatttgcccacctttaaaatatgactaacaatcatatgcttcataggttaagagaattagatgagactcctgttatgaaaatgctttgtcttggaaatgcgggctcttttttggttccatatgaactttaaagtagttttttccaattctgtgaagaaagtcattggtagcttgatggggatggcattgaatctataaattactttgggcagtatggccattttcacaatattgattcttcctacccatgagcatggaatgttcttccatttgtttgtatcctcttttatttcgctgagcagtggtttatagttctccttgaagaggtccctcacatcccttgtaagttagattcctaggtattttattctctttgaagcaattgtgaatgggagttcactcatgatttggctctctgtttgtctgttattggtgtataagaatgcttgtgatttttgtacattgattttgtatcctgagactttgctgaagttgcttatcaatttaaggagattttgggctgagacaatggggttttctagatatacaatcatgtcatctgcaaacagggagaatttgacttcctcttttcctaattgaataccctttatttctttctcctgcctaattgccctggccagaacttccaacactatgttgaataggagtggtgagagagggcatccctgtcttgtgccagttttcaaagggaatgcttccagtttgtgcccattcagtatgatattggctgtgggtttgtcataaatatctcttattattttgagatacgtcccatcaatacctaatttattgagagttttcagcatgaatggccgttgaattttgtcaaaggccttttctgcatctattgagataatcatgtggtttttgtctttggttctgtttatatgctggattacatttattgatgtgcgtgtgttgaaccagccttgcatcccagggatgaagcccacttgatcatggtggataagctttttgatgtgctgctggatttggtttgccagtattttattgaggatttttgcatcaatgttcatcaaggatattggtctaaaattctcttttttggttgtgtctctgccaggctttggtatcaggatgatgctggcctcataaaatgagttagggaggattccctcgttttctattgattggaatagtttcagaaggaatggtaccagctcctccttgtacctctggtagaatttggctgtgaatccatctggtcttgggctttttttggttggtaggctattaattattgcctcaatttgagagcctgttattggtctattcagggattcaagttcttcctggtttagtcctgggagggtgtatgtgtccaggaatcctaagccaaaagaacaaagctggaggcatcatgctacctgacttcaaactatactacaaggccatggtaaccaaaacagcatggtactggtaccaaaacagacatatagaccaatggaacagaacagagccctcagaaataataccacacatctacaaccatctgatctttgataaacctgacaaaaacaaggaatggggaaaggattccctatttaataaatggtgctgggaaaactggctagccatatgtagaaagctgaaactggatcccttccttacaccttatacaaaaattaattcaagatggattaaagacttgaatgttagacctaaaaccatgaaaaccctagaggaaaacctaggcaataccattcaggacataggcatgggcaaggacttcatgtctaaaacaccaaaagcaatggcaacaaaggccaaagttgacaaatgggatctaattaaactaaggagcttctgcacagcaaaagaaactaccatcagagtgaacaggcaacctacagaatgggagaaaagttttgcaatctactcatctaataaagggctaatatccagaatctacaaataactcaaataaatttacaagaaaaaaacaaacaaccccatcaaaaagtgggcaaaggagatgaacagacacttctcaaaagaggacatttatgcagccaacagacacatgaaaaaatgctcatcatcactggccatcagagaaatgcaaatcaaaaccacaatgaaataccatctcacaccagttagaatggtgatcattaaaaagtcaggaaacaacaggtgctggagaggatgtgaagaaataggaacacttttacactgttggtgggactgtaaactagctcaaccattgtggaagacagtgtggcgattcctcaagtatctagaactagaaataccatttgacccagccatcccattactgggtatatacccaaaggattataaatcatgctgctataaagacacatgcacacgtatgttttttgcagcactattcacaatagtaaagacttggaaccaacccaaatttccatcaatgatagactggattaagaaaatgtggcacatatacaccatggaatactatgaagccataaaaaaggatgagttcacgtcctttgtagggacatggatgaagccggaaacgatcattctcagcaaactatcacaagaacaaaaaaccaaacaccacatgttctcactcataggttggaattgaacaatgagaacacttggacacagggcggggaacatcacacactggggcctgttgtggggtgggggaagtggggagggaaagcattaggagatatacctaatgtaagtgatgagttaatgggtgcagcacaccaacatggcacatgtatacatatgtaacaaacctgcatgttgtgcacatgtaccctaaaacttaacgtataataataataataataataataataataataataataatagcatcccttgctgtgttaagaattctgtagatctgtgctggctaataagacagccactagccatatgtgactagtgagtacctaaaattcggccagtttgaattgaggtatgtgctctaagttgaagatacattctggatttcagagagttagtatgaaaaaaggaacataaaatatctcatcatttttgaatattaattacattttgaaatgacatttgtatatatttaattaaataaaatctattgttaaaacaaaaaaataaattgctgaatctatccaaaaaaaaagaaaatgctttgtaaactagaaaatattatacaaactattattttttcatctttcaattttctaattgtcataatatttgtatgtatttatggggtacatgtggtattttgttatatgcgctgactctaatgatcaagtcagagtatttggagtgtgtatcaccttgaatatgtattatttctatgtattaggaacatttcaagtactttcttctagctgttctgaaatatacaatacagtgttgttaactatagtcacactattctgctattgaacattagaacttattccttctatctaactctatgcctgtactcataaccaacctctttttatctccctacccatctacttacacacccttctcagcctctggtatctattattctactgtctacctacatgagaccaacttttggttcttacatgagtgagaatatgtgatatttgtctttctgtgcctggtatatttcacttaacataatgacctccatttccatccatgttgctgcaaatgacattatttcatttttatggctcagtagtattctatcatgtacgtataccacattttctcaatccatttgtttatagaagcttaggtggattccatatctttgctattgtgaacaatgcagcgataaacatgtaagtgcagcatcccttttatacacttatttattttccattggagaaatacctagtagtgggattgctaaattatatttttgttgtatttttagttgagaaatcttcatactgtttttcatagtgttttactaatttacattcccaccaacagtgtgtaagagttcacttttcttcacattctcaccagcatctgctattttttttgttttaatagtcgttcaactgggtaagattatatcacattgtggtttcgatgtacatttcccatttttccctccctccctccttccctccctctctccctcctttcctttccttccttccttccttccctccctccctccctttttctttctttctttctttctttctttctttctttctttctttctttctttctttctttcttttctttctttctttccttccttctttctttctttttctttctctctctctctttccctccctccctcccttccttccttcttttctttcattttctttctctctctctttccctccctccctcccttccttccttccttcttttctttctttttctttttcttctgttttttttttttttttttttttttacagggtctcactctttcaccctggctggagtacagtggtgcaatcttggctcactgcagcctctgcctcccagactccagagatcttcccaccttagcctccagagtagccaggactacaggtgcccaccagcatatttggctaatttttgtattttttgaagagatggggttttgccatgttgcccaggctggtctcaaacttctgatctcaagcaatccacctgcctcggcctcccaaaatgctgggattacaggcatgagccaccatgcccagcccagcacttattttcatatacctatttgccatttgtctgtcttcttttgagaaatgtcaatttatgtgcttgcccatttttcaatgagattttttttaacttgtttgagttccttctatatctggatattagtctcttattagatgaatagtttgcaaatagattattccagtcaacagattgtctgttcactaagttgattgttacctttgctgtgaagacacttttaaatttactgtagtctcatttgtctatttttgtttttgttgcccgtgcttttgaggtcttagccataaaatcttttctagacctatgtccagaagtgtttctcctttgttttcttctagcagtttttatagtttcaggtcttatgtataagtctttaatctaccctgagttgatttttgtatttggtgagagttaggggtctagtttcattcttctgcatgtggcgaccaattttcctagcaccatttattgaagagaatgttctttctccaatatatattcttgcttcctttgtcaaaaatcctttggttgaaaatacgtgaatttatttctgggtttgctactttgtcccgtggtgtatgtgtttgtttttatacaaaaaccatgctgttttagttatgacagtcttgtaatatattttgaagtcaggtaatgtggtgcctccagctttgtttcttttgcttaggattgctttggcagttcagactcttctttgttaacacatgaattttaggattgttttttctatttatgtgaaaaaatggcattgctattttgattggaattatattgaatctgcaaattgctttggacagtatggttattttgatgatttattcttttgattcatgagcaggggatgtctttccatttgtttgtgttatcctcaatttctttcgtcagtgttttgtagttttccttgcagagttctttcacttccttggttaaatttattcctaagtatttaattttattttttagctgttacaacttgtgttgccttcttgatttctttctcaactagtttattattaatgtatacaaacaatactgatttttgtatattgatattatatcatgaaactttactgaatttattaatttattagatctcagtttttttgtggagtctatagatttttttctagatattgaattacaccatctgcaaagaagggcaatttgacattctcattttcaatttcattcttttgcctgatggttctggctaggacttccaatactatgttgaataggagcagtgagagtgggcatccttgtcttgttccagcttttagagagaagactttcagctttccccattcagtatgacgttagctgtatctttgtggtatatggccctcattttgttgaggtatgtctcttctatgcctaatttcatgagggtttttatcatgaagggatgttgaattctatcacatgccttttctttgtctagtgacctaatgagatggttttgatccttcattcttttatgatgtatcacatttattgatttgcatatattgaatcatctttgcattcctgggataaatcccacttgatcatggtgtattatctttttgatgtactgttggttccaatttgctagtgttttgttgaggatttatgtttctctgttcctcaagaatattggcctgtagtgttgttgttgttttcatgtttttgtctagccttatagaatgagtaatggagaatttcaaactatattattaaggtatcagattcaatattaatactgtaggtaactcaaagctaattgctaaaaaaataaataaaatgaagttgtaattttttgaaacataaaatgcttcataatatgaagtatgtttggaattgaagccaaggaaaacacatgctgcttctcaaactatttgtcctttaatgaggtgccaaataactcaacatctgtctgagagttggtcatggcataaagggggataacttttctaatatactatgtggctgctgcttcattggggaaccttagaacagatgcactggcaatgtggtctacattgtacctttgctaacaagcttcctttgatttggagtcattgtgttcagtagacatcttaatggaaaagctacaattttgttcctatggaatacatgactattggtataaacagtaaatgtaatacacacttcttcctattgtgaggtgtccactggcttcacagtcctaccaaaggttaaacataccccaaaaccgaatcatgccaaggcaagctcaataattttaaagtccagcttttaaaaacttaagcagctaagtcactaatgaaaaaatatcctatctgtaccactgagatgagaaatttagaactgctagaactgctaatcttataattactaggagaattctgcaatttaaagcttgacaaatttttttttttttcctaactggcaaaatctagcattatctttgcttattttaaagttttaggttgattatttgacttaaatgaaatttaagataatttgccttatattggttttcattttcatggaaagaccatttctattacataccattcatatgtgagggtatgtgtgggtggctgagcacatcaggtttcatgtttattttaaatacagttaaaatctaaactgttctttcccctagaaactggggaattctggagattaatcagtggataaacagactttatagcagatgaatatatcattagtttcagttgagctttgcttactgtggtaacttgaatatccagatgaatttaatcaattaacaactagacattgtgacggattgaagtatacatgttcttaatctcaatgtactttcactctagctttggagacagaataaacaagttaaccaattaaataatacctgtagtcagctgcaatcagagttgtaggagggagagagtcccacgagagtggtggggtttaagctagtgtcaaagaatttggatacatggaggagagcagacaagcaaaagaaagaagagtatgcaggcgtctagaggagacataatatagaatatttacatatgttttgcaagtgaagtctgcagttctatatcctcagtttgaaaacacacacatatacacacacatacacacacagacacaactgcagaatgaacaacaaagggactgagatgaaacagctgctgtggtagttaggggcattggttctggggtgagactgcctggatttatgttccaacctttgtgattcgctctgtgactttgaagaactcacctacctgtactaagcctcagttgtttcataggtgaaatgggaatgactataatagtaccagatgaaaatgggaaaattgaaggagaaaaagtaattagaacaatgtccagtgtgtgattagatgtaagtaaaacttattatcatttgccatttgtggaaatgtgttcataattttgttacctgtggtgtattgctacaggacccttgagaccagaaacttcttttatttttaattaattagttaattcagcaatcagattttgaacattcatttataacaagtgctaaagatgagataagttgtctaatgacaggcatctgctctttgtacattttatatgattaatagttgttgaaataagggaaataattatcagcggttggaagtatatattgtcttaaaggttacttctttctttggtagttcaactagtactttttatagcccttataaagttatggtataattttttatataactatactgtataaatctttaggatctcattggtgtatcatcttgtggatgtctgtcccagtaaagaacttagactatcacatgtagtcaagctcattgttacaaaacatgcgcttcttattttaattacagaagtctaagtttaataaaaatgttgaatagattcaattcaatgtaatgaatgttagttatttcatttgtttgatatttcagtgctttaatggatttaatactaaaatgcttttttatttaatgaaaagcatggcagaattttattgcagtgcaaggtgcactgtactaatagtacttgacatctatataaattgttgtgttggattgaatgattagtattaaaaagaacataatatttttacttctcattgtgaaaaataaaatcagtcttttagaggtcaaataattattctagaagtcattaatagaattggatactgcccgagatgatccatgatgtcaggcccatgtgatctgataatctcctttatacttgttcttttctgaaataaagctgatctattaatctcatgtgtttttaatttaaattcatcaacttctgccttgatgtaagagaaaatcttataataggatttccccaaattttgattccttgcttttagaaacctagcaaagccatagattacagaattctagagctggaagagaagatattccctttattttataatcctctaattttactggtgaggaaactgaggcctgctgagttatcatacttgcttaagacaatagtcacaaaaccagactgaagctaatgttttctgtttccaggtatctatctacaaaccagagactcataatattgatagtaactaatttaagagcacacaacttaaatattttgacagggcttaccacaaatgagtcactattttaattgagtgaccttgtttaaatagatcaggatcttgttttactgttaaagggaatcaccaagcaaaacatgcctcaaaacctatttatgccttatagtcttgaaagtcatgatgtcttcagctccctaatatcagaacagtattttctaaaaagaaaattgtgaataacccttcacttagcttctctccacttaaaagcgtgtctgcatctgtacccaccctaaccccagtccctgcttctccctagggataattgtctacctgtgctataggtctctcttcttccacttcatcagttatccttttaccatcaaccactccctgtacatcagctctttcttctaaaaaatagacttattcaagtaatctcctacccacccgcccccaataaacaataaccttttattcatcttctgttgcatttcttctttgggcattactcccttctctttttttctacagagataaattccattaataaattatctacatttgctacttccattttattagctcaaattcactactcagacagtattttcacaaattttcataaattaaaaaagtacctattgaaaataaataaataaataaacattaccatgaaagtaaagcttgaaaataaaattcaatagaataattttttattgtaccccctaaaggaggaagaaatgaattgatgggtggtgattgtgaaagagaagtatctaggaggcattctttggaaggagtattctttctgcattgttttttccccaccagtctttggacattttagggactcatggttattgtctacttaaattgctcacaaagataaactcattagtggacttatttttaattaaaaatgaacatttcctaaatttatattaaaatgcaaagatctttgacttgctgaacagtttttaataagaaaaaacagagttggtgagcaaagcacatgagtagatatttctcaaaagaagactgacttacaaacagccaacaaacatgaaaaaatgctcaacatcactaatcatcagcgaaatgcaaattaaacccacaatgagatacgttactcctgcaagaagtacactttactctttactcctgcaagaatcgccataattaaaaaagaaagagatgttggcatggatgtggtgaaagggaatacttttatactgctcgtgggaatgtaaattagtgcaaccaccatggaagacagtatggagattccttaaagaactaaaaataaaactaccattcaatccagcagtcccactactggatatcaatctacccaaaggaaaagtaatcattatatgaaacatgcacacatgtttataacaggacaattttcagttgcaaagatatggaatcaacctaagtacccactgaacagtgactgtttaaagaaattgtggtatatatatgtataccatggaagactacccatccataagagggaatgaaataatgtgttttgcagcaacttggatggatctggaggccattattctaagtgaagtgactcaggaatggaagaccaaatatcgtatgttctcacttataagtgggagctaagctatgaggacacaaaggcataagagtgatataatggactttgggtacttgcaggggaagtttgggaggggggtaccagataaaagactacatattgggcacagtgtacactgcttgggtgatgggcgcactaaaatctcagaaatcaccactaaagaacttatccatgtaaccaaaaactacctgtaccccaaacaactgttgaaataaaaaaaaagaaaaaaacagagttagaggatttacactaagtgattttaagacaatattctattggcataaggatagacactaagatagagagtccagaaataattccatgcctataccagcaagtaattttctaagtaacttaaagaggaaaaaggtagtattttcaacaattaatgttggatgttatatgggaaaattaatttgtataataactcatgctatataaaaaaattaactcaaaatgaacatatacatatgaaacttaaatatataacttctagaaggaaatataggaacataatctatgaaatgatgggttgatcaaagatttcttagaacacaaaatgtcagaccatataaaattaataaattggaaaattctaaacctaaaaactttgctgtttaaaagacattgtgcagaaaataaaacgacatgtctcagccttgaaggaaatgtttacaaagcatatatcttgtaaataatttgttttcaaaacatgtaagcaactcttacaaaccagtagggagaaaaatcaccaaataaaattatgggggaaaagtcgaacatcatttcacaaaagaaaatatatgaatggaagataaacacatgaaaagatgctcaacattgttagttcttagggaaatgtaaatcaaaagcatagtgagatactactatactcccactagagtgggtaaaatgaacaaaaacaggaacaaaaaacctggtaatagtaagttttggcaaacgtgcaaagtgtctggaagtctcatacactgctgctgggaatgcaaagtagtttagccatgttgataattaacttggtagtttcttttaaagttgaatatacatttaccaaatgactcagaaatcgcagtcttagctacttacccaagacaaattaaaacatatgtctttaaaaatattgtactgtacttgaatgttcattgcaactttataaggtgtgaggggatggaatttatcacaaagaggcaaaatgatggaaaaattctgtgtcttagttttaacaatgttagagaactgtatacattactcagcttaaagtaggtgagtttcaataccatttttacttcaggtatgctgagaaaatgatacttcaggctgggtgcggtggctcacacctgtaataccagcactttggggggccgaaacaggtgaatcacctgaggtcaggagttcaagatcagcttggccaacatggtgaaaccccatctctactgaaaatatgaaaattagctgtgcatggtggcaggcacctgtaatctcagctactcaggaggctgaggcaggagaatcgcttgaacccgggttgcagaggttgcagtgagctgagatcacgccgctgcactctagcctgtgtgacagagtgagacactgtctcaaaaaaaaaaaaaaaaaaaaaagacacttcaaccacaggataaatatggggtctacatgaacattgaccgtgtttctcaccacacataaacattaattttatgttctgtcaaatagtaaaaatatactatttaccttctttaaataagtggatgaatgtcttgtaaaaattaggatggagatcattgcctaatttcccattaggcattaaaaatcatgaccagataataatgaaacaggagaagttacagatataaatcctggagaataaaggcaattttctctctattcagtattacttaacacagtattagatttaacatggtttacaaatgataataatgacagttgttttattgtcatctgggcaaagatgaaaaagaaaataataataataataataataataataataataatacttcaaattatttatagtaattccctaagaagtgaataggaagattttctgtaacctttgcattctatatttgaaggatgttggtatttgttttaaaaaatgatctacattccattttttatatatgcatgtgtgtgtgtgtatgtgttactagtctgttctcgcactgctaataaagacatacctgagactggataatttaaaaaagaaagaggtttaattggctcacagtttcacatggatggggagacctcacaatcatgatggaatgcaaatgaggagcaaagtcatgtcttacatggcagcaggcaagagagcttgtgtaagggaactcccctttataaagctatcagatctcatgagactaattcactatcactagaatagtgtgggaaagacccacccccatgactcaattgcctcccactgtgtccctcccatgacatatgggaattatggagctacagttcaacatgagatttgggtgaggacatggccaaaccatatcagtgtgtatatacacacacagtctgtgtaatgacagtctgagaaacagaagtaagcccaaaatctttctgtgatccaggcaatgttatttagctttatgataaaagagagaaatagttattggttcctattcaccaacactgagggagagtattatagactacatttgtggctggatagtaatttgtcagtatttgttgtttgctataatcattcatgattatatatagtctgaaagacttgggataaatgccatttaagaaattatattatttcttcatcttatgattcgtccttttgtggtgattgtaatgtttaccttgttagattcatcttgacctcctgtctggatccctggagactgtgaagcagttgttatattcttttgtaataagaaaatttaggcataaatagctcaaaagcagagttatgtaaggtattgttatttctattgtgttttttaaaaggaagtgaggttgaaagagggcattttgtggtgaaatgaagagcatgagacttaactgaaatggtgggattgtgattcagcaaagtatttaataaggacctactcacatgcaagactttgccaggcatcactcactgtttcatttaatcctcaaaataaccctgtcagatatataggatgcattatttctattttaataaataagaacacagtttcagaagcgtcaaataaattgctgaatgttccacagttactatggacagaattagaatttcaacccagagtttgtctgaatccaattgcagagaccttacctgtacacagatatataatgcattggcttgcatagaataaagtttatattggagaatcttcaaatgcctatcatcaatcctagaaatattaatgctcctgtcttcctaaaggcatgcaatacaatttcaacttttcttttagatttaggggtacatgtgcaggcttgttacttgggtaatactgaggtttggagtatgaatggttccatctctcaggcaataggtagtttttcagcccttgacccctttcttcttttctctctctagtattccccagtgtgtatttttcccaatgcttagctcccacttgtaagtgagagcgtgtgtatttggttttctattcttgtgttaatctgcttaggataatggcctccagctgcacccaagttgttgcaaaggacatgattttgttcttttttatgactgcatagtattccatgctgtacatataccacattttctttatccaatctaccattgatgggcacacaggttgatttcatagctttggtattgtgattaatgctatgattaaaatatgagtgcatgtgactttttgggagaatgatttattttcctttgggtatatgcccagtgatggaattgctgggtcaaaaggtagttctgttttaagttctttgagaaatgtccaaactgctttccacagtggctgaactaatttacattcccaccaacagtgtatataagccttcccttttctctacaatcttgcaatcatctgttactttttgacttttaagtaatagctattctggctggtgtgagatagtatctcattgtgattttgatttgcacatctctgatgattagtgatgttgagcatttattcatatgccttttggccacttatatgtcttttttgagaagtgtctcttcatgtcctttgcccatttttaatggggtcgttttttgcttgttgaattgtttgtttctaaagattctggatattatacctttgtcagtgcatactttgcaaatattttcttccattttgtggggtttctgtttactctgttgataggtttcttttctctgtgcagtatttctttagtttgattaggtcacacttgtcaaattttggttttattgcagttgtttttgaggacttagtcataaattctttgccaatgctaatgtcaagaagggtatttccccaccatcattcttcacagcattggaaaaaacaatcctaaaaatcatatggaaccaaaaaagaggctgcatagccaaagcaagactaagcaaaaataacaaatctggaggcaccacattacctgatttcaaactatactataaggccatagtcaccaaaacatcatggtactcgtataaaaataggcacacaggccaatggaacagaatagagaacccagaaataaaccaaaatacttacagacaactgatctctgacaaagcaaacaaaaacataaagtggagaaaggacacccttttcaacaaagggtgctgggataattggctagccaaatgtaggagaatgaaactggaacctcatctctcaccttatacaaaaatcaactcaagatggattaaggacttaaacctaagacctaaaactataaaaattctagaagataacattgtaaaaacccttctagacattggcttaggcaaggattttatgaccaagaactcaaaagcaaatgcaataaaaacaaagataaatagctggaacttaattaaactaaagagttttgcatggcaaaaggaacagtcagcagagtaaacagaaaacctgcagagtgggagaaaatcctcacaatctatacatctgtcagaagaataatatccagaatctacaacaaactcaaacaaatcagcaagaaaaaaacaaaaaaatcccatcaaaaagtgggctaaggacatgaagagacagttctcaaaagaatatgtacaattggccaacaaacatgtgaaaaaatgctcaacatcactattgatcaggaaaatgcaaattaaaaccacaatgtgataccacttcactcctacaagaatggccataataaaaaaaataaaaaataaatggtagatgttggtgttgatgcagtgaacggagaacacttctacactgctggtgggaatgtaaactagtgcaaccactatggaaaacagtgtggagattccttaaagaactaaaagtagaactactatttgctccagcaatcccactactgggtatctatccagaggaaaataagtcattatacaaaaaagatacttgcacatgcatgtttatagctgcacaattcgcaattgcaaaaacgtggaaccaacctcaatgcccatcaatcaactagtggataaagaaacgttacatatgtatatatatatatgtaatttatatatataatatatattatatatattccattttatatatatatataatggaatagtactcagccataaaaaggaatgaattaatggcatttgcagtgacctggacgacattggagacattattctaagtgaagtaactcaggaatggaaaaccaaacatcatacgttctcactcataagcgggagctaagctatgaggatgcaaaggcataagaatgacacaatggatttggggactcagggacaaagggtgggaagggggtgagggataaaagactacaaatagggtgcagtgtatgcagcttgatttatgggtgcaccaaaatctcacaaatcaccactaaagaacttacccatgtaaccaaacaccacctgttcccccaataacgtatggaaataaaaaaataaaaaagaagggtatttcctagattttcttctaggatttttatagtttgaggtttaatatttaaatatttaatcaaccttgagaaaatttttgtatgtgatgaaatgtaggggtccagtttcattcttcttcctatgggtagccagttacgccagcaccacttattgaatagggagtcctttaccattgcttatttttgttgactttgttgaagattagatggttgtagatgtgtggctttatttctggtttctctattctgttccattggtatatgtgtctgtttttgtttgggtaccatgttgttttagttactatagccttatagtatagtttgaagtcaggagctatgatacctccagctttgttcttgtttgggattgctttcactatctgggctctttttttaatttcacacgaattttagaatagttttattctaattctgtgaaaaatgatgttagtttgacaggaatagcactgaatttatagattgctttgggcattatgggcattttaatgatagtggtttctcaaatctatgagcatggaatgtttctccatttgtttgtgtcatctgtgatttctttcagcaatgttttagagttttccttctaaagatatttcacctccttggttaggtgtattcctaggtatgttacatttttgcatgactattgtgaatgagattacattcttgatttggctctcagattgaatgttattggtgtatagaaatgctactaatttttgtacactgatcttgtatcctgaaactttactgaagtcatttatgagttctaggaaccttttagtggagtccttagggttttctctgtatatactcatattgtcagcgaagatagacaatttgactttttttcctatttggataacttttatttctttcttttgcctgattgctctggctaggacttccagtacaatgttgaataagagtagtgagagtgggaatccttgtcttgcttctgttcttaaggggagtgcttccagcttttgcccattcagtatgctgttggctgtgggtttttcatacatggctcttattattttgagggtatgtttctttgatgcctaatatgttgagagttttttcatgaagggatgttggattttatttaaagctttttctgcatcattgaaatgattatatggtttttgttttcaattctgtttatgtgatgaatcacatttattgatttgcatattatgaattaaccttgcatcccaggaataaagcctactggatcatgatgaattaactttctgatgtgcttctgaattcagtttgctatattttgttgaagatttttgcatatatgttaattaggcatatttctgtagttttattgttgtgcctttgccagattttggtatcagggttatgttggcttcatagaatgaattagggagaagtgctcttcttgtacatttggtaaaatttgtctgtgagtccatctggcccagggctttttttgattggtaagttgttttattattactgattcaatttcaaaacttgatattggtctattcagagtttcaatttatttctgattcaattttgaatttgatattggtctgtttgaagtttcaatttctttctgattcaatcttgagaggttgtgtgtttctttgttaatttagctagtgttctattcatcttgtttatcttttcaaagaaacaatttttggtttctttggatggatttatgagtctcagtttcatttagttctgctctgatttgagttatgttttttcttctgatggctttgggattagtatgttcttatttttctagtccctctaggtgtcatcttagatcattgatttgagatctttttaacttcttggtttaggtgtttagcactataaacttttaacattgcttctgctgcatcccagagattttgtatgtgtctctattttcatttatttcaagaaatttttttacttctgccttaattttttttatttacccaaaagttattcaggagcaagttgtttaatttccatgtcattgtgtggttttgagagatcttcatggtattgacttttatttttattccaatgtggactgagagtatggtgggtatgatcttgattttcttgaacttattgagacttaatttatggatgagtctgtggttgatcttagagtagcatgcaatgttttaacactttcttatattgattatgtgttattgaagccatatcagaaatgtatgcaacaaataattgttttgccaatagaaatggaagattagaaggatcaaatgacttgttaatgatttcatagtcactaattgagctcttattggtagctaagtatcagtgataagaagttttgtttatgaatcaactactttccttcatcttcctgataaaattccacttaccttacaaaagcacagttcagatttactttcttgatgaagccttccctggtcctcctaggcagacttacataactttcctctaagttattgtcacaccttgtaaagcatctctgtcatataactgattgtatcagttgtgcattacgattgtgatgatactctacttagattcaacagtccttgaggacagaagtcatactgtttcatctatgattcctcaatgcctatacagtacacagccctcagtaatgctcaataaattgttgttggatacatgaatgaataaatgcccaagtacatgactatatgaattcataaataagattttggtgggtgcagaagtatattttttggttttagaatgctttccaatatataaataagcttttgctgaaacaaaaccaaaactaaacaaaacaaccctttaatttagagtctgcagatataggcactgtagtggaacaaactgtggaccaaaagccaagttatgcaaccaactaggtgaatgacaggtcagcttttatggatctctatattttatctgtaaaataagggaatcatggtatggcaaacattacaaaggtggtattttaataagtaaaagttgaaaatcactgctctaagacattttatggaagtgggtataataagcactactgtagtggttttcaagcttttctttttaagtggcagaacttcttgtcaagtaaaatcttacacagagttccagaatgtaaaatagttaaaaattagatgttgtagctgctaagtctctttgtcctctaatatttgttccttctggcctctcatttcctgcatatcaaatgtattaggtgcttgtcaaatttcatggatgagtccattcttagggcaaagcttaatttctcatctttaaaaataaatatagcctgggcaatatggcgaaacccatctctacaaaatatgcacacacacatgcacacacacacacacacacacacactagccaggtgtgggagtgtgcatctgtagtccctgctcatttgagaggctgatgtcggagaatctgttgagcccacgaggttgaggctgcagtgagccatggtcgtgcctgggcaatagagcaagagcctgtctcaaaataatttttaaaaaatttaaaaaaacaaaaataaataaggaaatgatagtttctaaatatgaagacacttaaagaccaataaaaatgtatttctatgttcctttatgttctatcaaaacaatattatgtggcattctagtattaccacatgagtttcagccttctgcttttgaaattgtttctgtttacatgcttatttttcgtatgtccacatagacctgaatcccctgacattttaatagagctgggacagacaggcccaaattggatgttgcttctaggtagggaatcactggcagacttcatatccaattatatttcagttaagccagtaaatattaggccattaattcatttgaagtcctggaaagatttctcacatttttgttatcttcctcttatgaagtctgtaatgatgtagtatttatatttctgagaaaggaatgcacagaaattttgtgtgcttgcttgcttaaaacaagaatgaactattgccctttgttgtttcagtggtcttcccaagaaaggaaaaaaagttacttgatgaagagtgtctggggtctttgagtctacatagaagacttacaccaaattactgtctgtgtcccatataccccatgaaacatgtttgaacagcactgtacaggtggacaattttttgaagtctagagacatagcacttgtgaatgaatgtcatgagtcttctgtattaacttaaaaaaaatttagtattggatcaaagtctaatttagaagaaaaaatacttggtgaattcttgttgaaacataagataaaacagagacaaattattatgctttttaagttatgttttagatatacagttttatacacacaatttacgttttccaatttaatgtaaattcctatgagattacatgaaagagtagctgttcataggctccatatgttctgccaactgcatatctctcctttatgtttcatcattaaaaaaatcttctgattcctttcttgttctgaaatactacttttattcccaattatcctgtttcttggccctgacccatcctatttgctgcttgttctctgataaacaatgcttatttgctgcttccaagtggcagcagacgtaatggttaatttcatgagctctgcaggcatagtgcctgggtgtgaatcctgtctctctgccttttcctagattagtgagcttagatgagtcattcaccctttctgggcctcagaattctcccctgcaaaatggagataaaaatagttgtgagaattacatgagatgatagatttagggactatagaatagtgcctgccataaagttattcatatctctgtcagaagagtaggaatatgtatcctgtcaatatagctgacatttgcagtttaccaggcattctgattctatttcctgccccctcctatctgctgcttttggattatcacactttcagggaatctagcaagaggcctcaagcctatctagtctactcattcaaacattttccagcaaatatttattgcttggcacaagagatatagtggttggcagtattctctatgagcttctgggaggcataaacctattcattcatacaaacaaatatgtaattgtgaaaaatactgtgaatagaaaaataatgtgataataccttcttacaggtaggggaagtccataaaggcttttctgaacaaatgacatcaaagctgaaggctgaagaatgggttagcccggcaaagttgaagacatgttatagtgtaggaaaagtttggagacaagaagggcatgctggatacactctacatccagtcgaactaaagctaaatgagttacaggggagagtgatgtggcataagcataaggtggggaagcaagtggaagcaaaaataggaagttgaggtttaaaagtcaagcagggaccagatctgtagggacttgtatgattaatcttcatattaagggttttgctttatcctaaaaattacagaaagcatgaagaatgcaaagctggggattaatataaggaattttgcatttttaaaagatcacactggagaatagagagagggggagtggaagggcttctctctttgtttcttagttacaatacctggaaaaggacagtagcctcctcaatgaagctttccttgataacattttgcccatagaggtggcttcactcattttttcacctaatgaacccatgatctgttgcacttctcacactgcactgtgaacctgacccaggccaaggtgttcagtattgtaggatgaataagcgttgattctcctctcctaagatgagacaggggcattttaaggccaaggactatgtatattcgtctttgtattatccacggcatctagcaagtccctaccacatgttgggctctcaatcttttgttgatgttgttgttgagaaatcagatgaaaagaagtggtttttcatgatggatggaaatgggggttttggatcatggatgcaatttaattttttatactctcattgaaagttggtaatattaattgaaatcctagagtggctgtttgataaatacctttgagggtagcattagaagatctaaatttgagcatgagcagatgcccagcaaatattaaatgaattgaatgtgtttcagccatacttgcctattacatctgtttgtagatcttctgtggtttattttaggagacggaaaaaattctctaatccatcctaaacctccactaatgccatcttcactttggcacagtgataactcagagatgaaaactctcaggtgtggagagagcttgcaataccaggttattaatagatttgaatacagggatttttttgttcttttccttttgtttaagatgaaacaaaaaatggctgaaatgaaagtgatttatatgcctctttatggtattttaaaccataagagattaatcagtgattacttttttttagactaggaaaaataattcaactctttaaaacttacccacttagtatatactgcagggaaattcactaacaaattcattgaggcattatttacacaagcagaaacatggggttagtttgtcactttctctctgttgtgttattgttgaacattagcattcagctcagcaaattgaatattaagaattctttctttttttgtcaccatgtgtattgatttcaaatgcatgccctattagtaatttacaaagaatgtattttatagtagaaattggtttaagtggttgttcaggagacatgttttactcaaagcagcatttagcctggctactttgccttttgatgattatttaaaaggatgccattatgtctttgttacttattgttctctcaggataagctaatggtttaagttcatattaatccctagcacttttcagtttttatctcaaaagtcattgatacttattacttaattgaaaaaactgattcttctctccaagcaatgtttgtgtctaaatattgagcaactttacaaataaaatgacctttcttattacatatacttttttcccctcaaatttacttgctctttattttttgcatcatacaacttcaaaaattttggggaggaagcacatttgcctctgtttatctccatcatattaaaataagaaagcagcaataactgagtgcagtagtcctgaatttctgaaagtgtgaagagagcagtagatgcaaattaagggggaaagtctaatattttatgtatcaaattctgatatgtttatctaattgttgagtctttagagttgttttttatagtttgtgtttatttctgctagttttctggaatttcattagtttcataaagtttacggatgattatactccaatccctttatttgacaattgaggaaaccgaagtcccagagctaagtggataactagagctaggtggatgtcggggctgggagtggagacagcagttcaggctctgctttatccggcatgtcttccttcagttcatagtacagtacatgctagcacaaaccagaaaaccttctttttcttgaactaaaccttgatgttagttttaaaagtcaagatcccatggtctagttttgaggttcttagacgtttatactttatgaattgataaaatttccaaagaattaggagacttacgtagaattgccaatttttagttttctcagttcagaacattaagaaacaaagcaaaaatacaccaatgcctcattatattattgtcatttcataaatggacattttctcatctaaaaggagatgagtaggacttttcctgttaagctagaaagggcaactgtaacccaaaacagtgaactaaaagccatcaaactatttcacgttctgtaaggatagacatacacaagggtggtctcgtacctcgctctgaggcagaggcagccagatgggttctgattctaatcctcatcctggcaacctctgaactctcatatacatagactctaggtggggagaggaggtgttggagaagtgcgttattggcctactgaaaatgaagaaccatttctagagacaagtgccttcaacaaaggacaggttaacttctgtatcccttaggctccagttaggaaaacaaaaggatttaatacaagcaatttgtcaattctcctggaagaataaagagggtctcctctctccaagtctcttctagtctcctaccagtgatttccattgtcagcacctaaaggaagccacctagaaagagaatctgttaaatatagtttgcgatgtagtctgcaatgtagtttgattcacatagcagaatttagaatgattggcttggggctgaaagacattggtaaataactgacagtatctcttctctccattgatcacttatggagaaggattttgtgcttttttgagaaggagaaagagaagtggagagatatagcaaggaacagagaagaaatagcagcaaagcagcctatacatttaggtgtatctatacatttagtatacatacatttagtgatatatatatttagtgtgacaaggatgcttgagcttattctggatcaagtggacattgcagcttgagccatcatgtcattattccaatcaagagagtagactatcgggcaaggggaccttaccaacaggagtttcaatgtgtgccagtgggggtggaactgaagttacttctccccagtgtgaaagctcctactgccccgttacaggaagggcctcatctcaacaccttccttagagaaggcgtcaaagtaagtctgattttaccagagaagcagagacactcaaaaaggactgcaattaaatgcttagttaagtaagaagacttttccctcttgtcattagttcttctactctgccacaatatagaaagagttagaacctgaagataaaaatagagaggaagaataaaagagtagtacattctttcttcccactccaagtcccagacactggccactgaattaaaacagttatacgatgggagttatggaagcaatctgaactgttgttaaggaggagagaatagatttgatattgcatatggaaaacagttattggagaaaaatgaagactagttcatatctgtgctctactgagttcagaatgttcaataaatcagttacataagaaatagaatgaaagctttttgaacatcatctgcaaaataaaagatattttttaaattggaaaaaaagtagtatttttaaactcaaaatattacttttgtttttctcatttctgcatggttttgtctagcatgtgtccatgatatagaattttaaaataattatcactattcactgaaattccttttagccaggtatcactagtactgataactctaacctgtgaaaggtgaaattcacacattaacacagaagtcagggtccttttcctcattttagcctttaaatatctgtggagaaaggggaaagaggaaaaggtgcaattatataaagaatattctagtgtgaataaaacagaacgttatgaaggactaatataaatttaaaagcatcttttaagtggtgaaatataaaaccacagggaaaactattaaacatatatcagaaatggaatctgtcatcacatttgtcaccttggaaatttttagaaagactttgttttaatgaagcatatggtgttttgcttattcagaagcaaattttataagggacagtaatctcagattaagagaacctgatctgtcctctcacttacaacatttgccttaaatatgaggcatttaaaaactttagtatcttttaatatcactcctttttgtccttacgctagtagggagcatggctccaggaaactgatcaccttaacttgtattaccaatatcagaaaaaaaagatataaagaccatttcacctagtttcaccttgaaaagatgtaaataagacccaatcagtggtacagtgataggttaatagtcttggttttagaacaagaatgttctggtcttaaccagtagagtgcatgcctttgggcaggcttcattactgttcccaagaaatgattccctcacttgtcttgataattgtgcctagctcatttggttggttgcttttatgacataattgaaatcatgtacgtagagtgcttaaaaatggctgaaggtaaatcctccatctctgttagcctaaacaaaaggcagcagaggttcctgaaaagaatctccattgtcatctgtgagtgaggacacaaaactatttttgccttacaaaaacaaattgagataatgcttgccgaccttttctcaaagtatcaaaaccaatctagatctccaagtaggttctactcatttattctttcaatacttatttattgagacttgcttgtgtcagtcactgtgctaggaactgaggggagatatttaacaattaccttctgactattgtaaagttttggaagcaagtctgtattagtcaggatcctagtaggaaatagattgttctcttaaagaagctgaaagagagtttaatggaggtactatttacaaagggtatgggcagggttgaggataaacaaaaagggctatgaaataccaggaggctagcaacaatgggaagctgcttccggttctacagctaaatagggaggcctgcaggatctgtgacctcaagtagaacgttttagccatggctacactatggccagcagagagggtcccctctttcctcctgccttctgatcttttgcaactgcctccattggctgaacatacccaggagccagagggctagacagtacctgagaaccagcctcccagggcacagaccagaatggagaagggccaagagtgggtctgaaggggcagatgaggaatatccagaaaacaatcaatctatatttcttgctttttttttgtcttatataacatatattgacttttttccctaaatataaaataatgtatttttattgtagaacatttggaaaactgccttgtaatttgtgatcctgctttttccgagtcaggacatgtgtccgattgaaggcacatgaatttatatagtaagttatcatactcaaaggatcataaaacaaatttatttccatggctaagaccttacaaaaatactcttgcttgtaaaaagacctactgatgttaccctggaccattttgtctctctgcctgttgtaagcttcctcatcatggcatctttctacatgtattgcactcttggcattcctttttatatttttgaacatcatattgttctacattttctccactaaagaaattcaactcacttagaaaaccttctataacccttattccattattatcattcttccattatcatcatttcacatagcatctttaatattttttatatgctcacaactttacagttataatcattgagtatgtatagttttatatcctgcgtttaaaacacatttaaatcttgcttttcttaaatttaggagtctgaactttttttttttcaggtttaaccctaactatagaggccctcaatattgactataaccctgataaaatatctcttgttgcttgtctacttttgctgggtttcaagcagcctttgagtaaaagtattaaaattctgcctgctgctgtttggtcagcattagaggggcatcgtagttctaatcattctttggtgtatgccgaggaaattcttgtcctttgcatattgaatcaaatacctgaaaagcccatggggttctctccctagagcacttataaaggcaaagtttctcccttcccccattctcttatctactttgtcagtttcactgccaactcctgcataatgtagtcaaattatgtgttagaaattcaaccctggtttcctgggtgatggtacaatgccactgcttagtattcctagtcacatagctacaatttcatcatgctgttaatctatatatatcttcatgctagagaagcagacttttttttaaataaggcatgcattaagggttaaatggacacagtgaaaaaaatatgtaggagtccttgagctcagcaacaatacaggatatttttggtactaagaccttgtgaaaccattatatggactaatacttcttggattttgtattttttatagtacatcttttttcagttaaattctgcaaacaccgaattctttgtattgtcttgtagtctgttgtatgacaactttatattttaaaaattttattttagacttagtgggtacatgtgcaggtttgttacatggatatattgagtaacgctgagatttgggcttccagtgaacccatcaacccaaatagtgaagacagtgcccaatagatactatttcaccttttacccccctcccactctcttccctttgagtcttcataaaccagtaactgctttgcctttggtttccacaatcagagtgcacccttaaattctggtagtgttatagaggttctttgtttctgcaatgacttccagtgatctacacaaagccaatgtcatgaactacagcatctctatctcaaaatagctagatttgtgtgacttaaaccaggaaattcaagctctaactaccggttgctagaattttctgtgataagtaattgcctactagtttatgcaatagacatatgagagatttaaactggtggtaaaaattaagattaaggtttttttctttcatgtatatatattctgtattggtttacttttcttcactttttttttgacagtataaagcagtcatattctttaaattctgaactcgtcatattttagctgtgttaccttggccaaataatttgttctctctgttcctttgtagaaaaagtgatgaaaataatctaacaaactgttgcaagcatcaaataaaatattttatgggaatatactttgtaaactataaaacatttgtgtaaaatgcatgttatttttagattcttcatgatcattatttgggagcctaattgttactcattattcttactatcttttcccaaatagctttgtaccaatttcttggatttttgtattaatattttgtgaagctcttttctcagcatatcaaacttaattggcttgggaaattatgatgtttgcttttacatgtacattgtacatatttcaaatgttaatttagagagtatgccacatatttttctttaaggatacagagctgttcttttttgtgtgtttttttctcctgtaggtattaaaaagtgtcagcaaactgcattgaataacagacatcctaagaggggatattttccacctctataatgaagaaaagcaggagtgtgatgacggtgatggctgatgatgtaagtttcaaaaggtcccaatcatgtttggtctgttcaataaagaagtcactggataattctattcaaagggcagctgggggcatttaacacaccactctgtgactaggtgtttctatgacatgggcacagccagcacctggacctgacgttctgtgagttggacagcaggaacaatgccctctttgcatcttggaaatgggctgagtttcacttttatggttttcaatcacagaaccaccaatctctagtctatgcccagatcctcactctcagataattcctctttccacactgcttgcattatcatcagttctctgataactttcttccacacttttacccatgtacagctaacccttgaaagtcacttcctgtggtggggtttttgacaactactcctaagaagcttgtgatacacacatcccctaggcctttgctactgaagtgtagtccttggactagcagtattagcattacctgggtgtttattgagaatgcagaatctcaggccacacctcagacctacaaatcagactatattttaatgggatagcagagtaaataggtatgtactttgtttgaaagccccgatctaaatcatctgaagaaatctgtaaactatcttctatagctttggatcttggtccttaattatctctttgctttcaattgaccaatccttcattagtgtgtctttaattgtctcatctttacccaattactgtttgtaattgaactaaaaattatgtgccgctgatcagatatgtgaaaggaaagaagggagggaagaagaaaaaacaattttccttgttttctgtaataatccatcttgttaagctcctgtttcacagatgctcaccctatgggccctgtggtccctttgcctcataccgtagcaaagcctttggcaagaatgctagaactaattctcagcttccttctgtgttcctgtaggacccacagtgcagagggagagttaggtgtgctatttagatttttccttcccaaatacactccttttccattgccatttctattttttgtgtcaaagaatctagttaatgtgttctgttctgtcacttgtggcagcatttacttcttcttcttcttcttttttttttttctttcttcctctctcctggaccagaagggcatttccttaagttatagtctaagttctcagtaccagcgttgctcaggatacctaaaagaaaacttctggaatttagaaaactttttttcttaaaaaaaaaaaaaaaggcttgtgattgtcccttaatactatttgtatactgtgtgcgccaatattttgttttttggaagaataaaactgagcaatgccttccatacggacaaaccattagttctttctcattgcatccttagaataataatcctgatcctccctgagggaatggtgggcatagtcaaaagaagaggaaggttgcctgcaagaagcatgcaatggatatgaacattaaccccaccatattgaataaatattacctagatttactctgtccactgtggtagccaccagccacatgtgactattaagtattagtctaaatggaaatgtgctgtaagcatgaaatacatcttggattttgaatatacagtgcaatacaaagcatttcattaataatttttgataatattacatgttgcaatggttatattttgcatatgcaagcctaagtaaaatatgttattaaactaaattttacctgtttctttttactttttaaatgtatctactagaaaatttaacattacacttttggttctcatttgcatttctaatcacagaaattatatgtgcaaatatattaggagattgtttcaaagaagggaaaatagtaagagcgataaaaattattccaacaaactactcttgtaattgatggtgactgcctacaatgaaatcagtttttgaagaaaaaattacttttattattgtctcatggagtatcatgacatttagcttcaatagggactctgactgtcatttgctgctttccataatttccatttctgatttcataagacttaaaaaattatgtcctgtggtccaaattgaatgtgtaccgaagcacagtaggagaccttaaaaataccttattccattttctcactatgagtttaaccaaaagaattcaaaaagtagagaatgcttcaaaaatgactgaaatagacaaaacaaaagacaagtaacaacagcaacaaaaccttgactacttaagcaccagcatttctcatctggacatttcaatggtcctaacttggttggtttcgatatggggatatgacaaacagctcagtcctttggtgtcccctccccctcctctctgtaaacttctacttaggtgcaggattttacactaccttttcctttgtgacaagcttttcaaattttattggcaagaatactgacttttaaacaaacagttattcagaaacagaaggataatccaaaactacgttgtttccttagggatttttcatattaccagggaattttggaaaccatgatacattttaaaagttgtgatttccagaggtaacattcaaattaatgttcctttctgcaaaatatttgaaaatttaggaaaggaagttcaagatcacaaatcagtaattgagaattgactaaattaaattttactttgaggtttttagtaattttagagtagtggtgtataaattatgggtatgaattacagagtgtgaagtaattatgaataaatctgcatgagttaattagtgtttgtaaaacaatattaagttttcatcttgaatttaatttctgaaaagctattccattatgttcttactttgtggcaatgcatttaatattaactgaggtcttctggaacaaatctttttaacttaaagaatatttcaaatttgaaaatttgagcttgtttgcaaattagtgtgggaaatattttgtgataggtgtgacttttttatttttcaaataacaagtgccaaatagtacccatttaggtcacttactacaattaaacctggatggtaatagttcttttttctaaagaagaaaaatatctaataatcatattaggaggttagggtggttggcggtttagctacatgatagatatccttatttctgttctttggtaaggtgtgtcttacataagagataaagtatatattcaagactttgctttccagataaccagtgctttctttacatgcatatttggaactagactgatttaccattatgatttcctttagtttattcttaaatctcttcaggaagattttatatattttgtctcctaaagaagtttgtaagtcttttaaaaaataaacatatatattagtttttccctttagcctctaatttacacacatagacacacacacacatgcacacacacatacacacacaacatacagtaagtgctaggcctacaatggatttgatataataactagttactagacagtgaaacactgatacattccagaatgtttcaaactctggaaaattttaaattgttttgtcttcttcctgatactgaactatgattctactgaatttcaaataaatagtattttaaaattataagtcaagcacaagaaaatataatggtgtctcattttctggtatggagggtggggctcctgaaaattctcaagcctgttcttgcctagatttctatcatcgaagtatagtcttgcatgcatcagataagtataaatcactagattatatgttctatgagaaaagataccattcctctttttgctattgtatccttaaatagcacagtgcaaaataataatagatgtgtgtcaaatatttgttgaattaacccagctagatcctcaaacttgagttaattatccttatatgaactaggataggggccgtggggtagaggagcggagggtaaagaactttgtttaaactttaggaggtctagtctcaggttctcctaactcgagtctgaagagctagtaggaaatacctgtctttagtgtcacagagtaattttcaggtgagagactgtagcctgatgctaggacttccgttattccctgctagctaagtgtgaacagtgaaaattgtaactttgaaaccttaagttgatatcagtgaccattgcagggctataacattttctgtcttttagctggtatgaatggtacaccaggcagaggctcatttgggcctcccactcccaacaatctcaggacccattgtcaccaaaagatatgggaagaataaataacttgtatcattgagtaccgcacaatgtctttgtcttctcacaaagtgtatgattaatgtcagcattagggcatgtacttgaacgtggcagttcaagactgaataaagtatacttctttttctgagttcttacacaatttgaaaaaaaaatctccaattgtaagaagacctttcataagaacataacagtcacctctaattatcaacattcagctgttctaagatagataatatttttactttaaaacactggatggctaggcgtagtggctcatgcctgtaatcccagcactttgggaggccgggacaggcagatcacctgaggtcaggagtttgagaccagcctggccaacatggcgaaaccccgtccctactaaaaatacaaaaattagccgggcgttgtggtgtgtgcctgtagtcctagctacttgggaggctgaggcaggagaatcacttaaacccaggaggaagtggttgcagtgagctgagatcactccagcctgggtgacagagcgagactccatctccaaaaataaataaatacataaaataaaatactgaacgagaaactttatattttctcatagtttgttcccatagttgcagaacgataacattgatttccaaaatatatttttgattttagcaaatatcattttagcaacttatgaaaaaaattaaaataggaaagaaggaggcctccaatccacatgctacaactagtaaacattatctatatgcctaaaaatctccaggaatatgcaactgataagtttattctaaaagctgagaatcagcctcttctattgttttctctttaagcttttgacatcgttgttagattctgattgtgagataatcaggacatcataagtgacagcttgatcatttagtttcttctttcactccatttaacatttgaatttcattttctttctcttctttttttctttccctgtggttcctccagaatgttaaagattattttgaatgtagcttgagtaaatcctacagttcttccagtaacacacttgggatcgacctctggagagggagaaggtgttgctcaggaaacttacagttaccaccactgtctcaaagacagagtgaaagggcaaggactcctgagggagatggtatttccaggccgaccacactgcctttgacaacgcttccaagcattgctattacaactgtaagccaggagtggtgagtagcctcaaaatcaaatgtcaattctaaatttttattttccaatttctccaaatacaatttcatagtattaaaatgtgagttttctgtgaaatacctaagatgattgacattttgagaattcgtttccctttagaatcaaagataaggtcttgtaaacagtggagatattttctagttcttcagagtggaaggaacatgcttcatttaaagctactgaggaaggaatgagatacatttacattaatgtaaagggataacaaaattactgcttatgatctaacttttttaaaaagagctatacagtgtgcatcagtattttttgacttagaaaaacaaattacatgttactatatgtatatgatgttcttattgctgaactctacacttctccctagcttctatttattatcatcctactttattaatctcagtttgtgattatctataaaataaaacatttcattgtaaattgaaagagtaatgaaaattgcgctatgagagatgctggcactgttgtgcagagtctatatttgtgaaagaggctattttaaaccagtgttgaaaagttaatcatataatcttacaattgtggttattgtgccatgactgcttcaaatatgtgctttattatatatttaataattagtacattctcacttttccttttctgttttcctacatcattttaaaatatttttcaggaaggattggcttacatatcatggaggtttatcatgaaagtgaaaaatattttctctgatatgattttaaattaataatgtgttgcttttaaaatcactttttgtttacataatttatcaagtgaaagactaagcattaaattattgtacaacattattgtagtaaattattaaaaatctattatttttatggtgtaccatgtacagagctctgccacatgctgagctctccagggctgatgagtagcccagtatgtgctctttgaataatgatatacggcatcttgacatcctttagtcaatgtttacctgacacactgagcattagatcactgaaactccaggtatcacagttaatagcatcaaatatttaatcagacaatctgtgtgatagagaatcatgctaaaacattttaaagaaaatgggttaaaaatttgagaaggactgtcttacatcttctgttcagctgaattaacattatataagagtcatagccaatcatggagaattaaaagggcacatagggctcccctataggatactcaatcacatagcttatgtgattagtcttgattatgtgtctgtataattacggatttggagtcttaaagatttccagatttatttttcagcaggttggcagtgatacaattctatcagttgttaaagtattgaaatgctttcataccagttggtaaatatatgctttcttgagctctctgattgcccctactactctcgcagactattctcctgaagcctctagaatttctcacaatctaaaaacaaagaggtgaagactggcacagaggaatctggttttggtgggtgttggtgctatatctgttgttagctattttgagtaacaccctgggtaaaatgtacagtgccttgtaaagtttgagttcatttaattcaaagacattttgggagttgtagaattgttccttccttagaaatatcaaatctagactctgccatttggggcatgcttgtttctctttcctagttgaatgtttttatttttaaaggagggcaataatatttacctcataggctattgtgaggattaaatgatgtaatctatctaaggtattttgcttagtaaaatgcatatggtaggtaatcagcaaatgttgatttttgtcctcttgatcattatccaataaatattttctggaaattagaaaccatgtctctagtatcagtagcctcattcttggcgtcagtattttaggttgaaatggaaaatttagccattattcatgttcaatagtcagtgagcaccacatattggtaattcatttataacatgtgtgttttatttcaattaacaggatactttttaaagtatgagaatagagtatgcagataactctgaatttattttaaaacataagtaactaaaagcatttctttttttttttttttttttttttttttgagacggagtctcgctctgtcgcccaggctggagtgcagtggcgggatctcggctcactgcaagctccgcctcccgggttcacgccattctcctgcctcagcctcccaagtagctgggactacaggcgcctgccactacgcccggctaattttttgtatttttagtagagacggggtttcaccgttttagccgggatggtctcgatctcctgacctcgtgatccgcccgcctcggcctcccaaagtgctgggattacaggtgtgagccaccgcgcccggccctaaaagcatttctgaacatctcttgaaaatccagcttccactggaatactgatagctgaagactggtggaattattggtgaaggaatctgattaaaaaatgatttgactagaagtgagggaactgggttcaaattatcatcaatgccatcaacttgatgaaagttcatagagataaggagtactgcctaggactacgtgagagaaagaattatgcttaccacttagagtaccaagaatatggaatcaatttccatgccaagaccagcaatgagcaaatgttttctctaaaggaccagatagtaaatattttaagttttatgagctttgcagtctctgtcacaactactcatccttgctgttatattgtgaaaggagccatagccaatgtgtaaacgaagaagtgtagctgtgttccaataaaactttgtttacaaaaacaagcagcaggctggatttggcctgccagagtttgccgactttgaaaagtctcccttagaaaagtttccctttctaggctagtaaagatctctaagacgtgatcctaggatttgatcattgtttttacagttatcaaggacaaaaactgactttgaggtcatggctgatgtgccaaataagtcataagtatgggactgtgtgttctagatcaagccatcaaagacagtgaaataatttgaatccgttctaatgaaaagtactgcctaattttatataaggttttatataaaaacattaacatgattttatcatatgtttatttggagaaaacaggccatcattacagaaaaaaggccgggaatataagaatagtgattttatttgtcatggagcaagaaagagttagaaaggactcaagcccagttttattgggtgacttccattttgtagcctttcagatgagtttctattataatacaatctccaaaagacacaaatgaacaaacaatggagattacaatacctacacttcaaaatcatgtggaaaattaaagaaaaggtttgctatgcatgtagcacaatcacttgttcttaatggttattttgatattattattattgtcatttttattgttacatttagactgagtagccaaaattatgcattttctattattggaggttttaggggaaacttagctcctgagttcttggaaccaacttggaaatatgatgaaagaggaattcagatatgaaagcaagatgttatctttaatactgataaagttgatactgaaaaatataatttatgtctgtgggcaagtgggttcctaatattgaaacctataattgcatagatgctagacctgggcaggatcccctcacctcttatacacacataaatagaaggcctacccctacaaaacttgtagcatggaggatctgtagaaatcctactcacgtgagaaagtagagggaaggattgaactgtacatggccagttcccccttatgaaaacaccaagaaagattaaattattcattctctctgggaaatagtgagtaaggcggcagaaagaggctggaaatgtgatgctggtggcattccagacacttgcaagacatatcaaacatttcccaatttttaaaatcttttcaccttaactttaggggcacattagggatgtgcctgttctttagaggaagatatcaggagtataccagtactaacttactgccatctttgtgaagctgttctcccaatattgaccactgcccttttgagtattccccccaaccccctcccccacaaaaatctgaattcaaagtttcctgctcttgtaaactgaagttcaaaaaatgaagttctcacatttatcttccatgtcttcttgattttctcattttgttagcaggaccttgaagcatggtttagaaggagggtttcctaaccagctgcagcctaagtcatcttccactgtaaaggctgtagtttcttcaggcccataggaattgtattcgtataataccaggtctctgagggacttcactttttaaatagttactgatctataggttatgcaatgctgcataaccaaatttagataataagccaattctgggccttgaacatctatagttaatctataactttaatcttcttacatgagggtcttagaacactttactctttcaagcccttccctgcttacagtttgtttttgtgtattttagttatttctctctctctgtatatcttaccacacaatacattagcattattttttgcattcaccgtttgatttggattttcccagatacttaccaatgttttggttttaattcctcctcatatcttagaacctctgctggaattatttgcctttttgcctgaagtaaattcttcagaatttatttcagtttgtctgaaaatgtctttactttatttcaacactttgaaactatttttccctgctttttgtcttctgttgttactattaggaaatcagctatcactctaattgtctttcttatagataatctgtcaattgttttttgtctctggatttgggcagttgaactttgatgtgcctaaggatggatttcctttcatttatcttatttgggatttcccggacttcttgaatatgtaaatttatatcttccttatcagatctggaatattctttcattacctcttcaaatattttctctgccaatctttctcctctgctgttggatttctgattaaatgtattttataaacttctttgtcttccatttctcttaatttattccacatttttttctcattttgtctttctgggctgcattctgataattgtttctaatctgccttccagtttgctaatttttttttttttttgagacggagtctcgctctgtcgcccaggctggagtgcagtggcgggatctcggctcactgcaagctccgcctcccgggttcacgccattctcctgcctcagcctcccaagtagctgggactacaggcgcccgccactacgcccggctaattttttgtatttttagtagagacggggtttcactgttttagccgggatggtctcgatctcctgacctcgtgatccgcccgcctcggcctcccaaagtgctgggattacaggcgtgagccaccgcgcccggccgctaatttttttttcaaactatgtctcatttgttattaaacctattatatttttttaattttgattattgtatttttacattttaaagtttgtattcatgtatttaaaaatacactagataatgttatgtggttttctattccctgctatctattactgcatagcaaataatcccaacatttactggcttaaaataacatttttatctcagagtttctatgaatcaggaatccagctgtggcttagctgtgtgcctctgactcagagtctctcacaagactggaatcaagtaattggccagtactgtagtcatgcatatgggtggaaaggtgggcagaactgcttccaacctgatcaacatggttgttgacaggctcaattcctggctgtggctgactagaaataccagttccttgccatgtgggtctcatagacctatgtgaaggctatttataacatgtcagtttggtttctccagagcaagtgttttgagaaagagagaccaatagagactgagcaagacagaggtcaaagtatttttacaacttagtcttagaagtgacatcccatcacttttatatattctgttcattaggtcttacacatgcacaggggaggggattctgcaaaggaataaacaaggaggtggagatcattggagatcagtttagaggctgtatattgcactgcagatattttcaagcttttagagagcaagaatagttattttacccttttgctcattttagtaactaaagttttcagtgagtctattttctattatctgtgtttcctgatagtttttgctcatgcttttaaaaaactttattaagaaaaatagctaatgcatgctgggcttaatacctaggtgatgggttgataggtgcagcaaaccaccatggcacatgttgtatgtaacaaacctgcacatcctgcacatgtaccccggaactgaaaattaaaaaaaattccttactactatttaaaaaaactttattaaagtacaatcagtgtgcaaaaaagtatacctatcataagagggcatgttgataaaatttcacaaattggacacaaccacaaaaccaggaacaaaatcaagaagcaaaactttactagtgtctcagaagctcttcttatgcaccccccgagcccctgccccatcactacctcctccatacctccaacaacatctattagttttgtctgtttttgaactttacataatggaatcacataatgtgtaatattttgcatttgacttatttattgccctcaacattaggtttaagaggtgtgcttaattttttaaaatttattgtgtgctgccacaataaattaaatgtcattgaaacattatttgtaggcacagtttaaggtatcagaataaggttcaccatagagaatttgcatttgattctatcaggtctctaggggcactggggcattggtagattgatcagagggtttctcaatcatctagctgaaacatgatcataatctgttaaggtccactgcctatgaccccacgccctcaacccctggccctgcttgaattatcactgaggctacccttctggcagtctcctggatgtagagtaggggtgtgtttacttctattttacctttgcaatgagaaaatagccctttgaagttctggtttaagttgggaagactctccttttgaatgcctcaccctggcatggctgggctttgattacagttcccccttgaccctcaaggacatcagactaatattaacttttactctgtgtggtaaatatcctcagggcaaaagcaactttgacgtccattatgcacctttggtgagaaaagtccccttacactttgacttgctatttccttactaacttggcatttctttagtagcatcaagaaaataagatgatagttttccttatttttaaagcaaaggttttgttgagataaccttgtgaacaatattacagaaaactttcatagctacttgctatggagatcttaggtcctttcatcccacacttgttttggctataaaattgcctttagtacattcttaaactgaagcttctgatgataattcttaagtttgtgctcctaagggcctactgggacctatttctttgactttttctcccgaagacactatctttccccagtatctgaatgtttttggctttgagtaaaatgtttgcttattttatgtagtagatattagtgtctttactgttttatctccctttcagaaaggaacatctgagtttgcaatagtttaaactgaatcttgttttactgtcttttcttcctttgtacttgtaggcctacatagaattgattacttcacttcttttgctttctcttgctacttgatctaggtattgttaattatccacggatgaggataaataacaaatacacacacacacacacaccccttaggcatatcatattcaaacttcagaaaaccaaagacaaagaaaaatctctaaagaaatcaaataataaaaacagacatatagaggaacaagaataagaattatactggactgtttgtcagaaaccatgaaagcaagaagagagtggagtacattatttaaagtgttgaaataaaaactttcaccaggctagaattttataaccagcaaaattatccttcaaatgtgaaggagagagggagactttttcagagaaacaaaactgaggaaactcattgtcagtagacctgatttataagaccatgttaaaagaagttattcattaagaagaaaaatgatatagggcacagatctacacaaagaagagtgtcagaggagaaataaatgaagataagataacattgtttagttttttcaagctaaactttcttaactatataaaacataactgtttcaagcaataccaacaatgcactgggtggttatagtataggggtaagggaaatgaaagacaacagtgtgaaatgaacaagcaggagcaaatgggaatattctgttttaagatatatatactacatgtgaaggcagacttaggttacttaaaatataaatatgtattatatataatatatgtaaatatatataatatgtattatatatataatatatgtaaatatatataatatgtattatatatataatatatgtaaatatatataatatatattatctttatcacatctggtacagcagctgcaattggagtcatcactttgttaaacttatgataaggcactgtcattctccaagatccatctgtcttctgcacagccaaatgggagagttgaatgggaataaccactcgtgcttctttcaagtccttgatagtggcactaatctccacagtccctccagggatgcgatattgtttttgatttactatttttctaggtagaggcagctctaatggcttccatttggcctttctcaccgtaacagccctcaccctaccagtcagggagccaatgtgggggttctgccagttgctaagaatgtctatgcctattatgcactggggaaatgaccacaggatgagtccgggaacccactggatccactctttgttggacctgagctacaactccattaattacctgacctccataagcccctgctttaactggaggaccacagtgacattttgggtcctctggaatcaatgtcagctcagagccagtgtccactagttccttaaatgtcgatcatttccctctccccagtgggcaggtaccctggtaaaaggctggaggtctccttggggaaggatgggagaaagattcactgctcaaattgtcgataacgtagtgaggtccttcctcaagggtacctggcctccccttcattcaaggagttctgggtctgtaaactggctcaagtctggaaatcgattgaggggccattattctctgtttttataatttaaattagtcttttgtccattcgacctagaagttttctgctagtataaattaagtacgaatgcagtaggcttcctatcaatttcacttctaggaacaccgtgattaattagccaatgccataactctacacgagtcagaccattctgattgccactttgcctctgctgtccaataaggtagctacgcccaccttgcctttgaaggttgagtgccaccacttggctcctgccacctcaggatctaattactcccattgtatttaaattttgtggttgagtgactgcagttcccactgttagatctgacatacagagaagagcaattacagggctcttcaaagatgcaggtgccaccctcgcaaatctattttgcaaggcattggtcaagggtgtatcttctggaccctcccagctgggatgagaggtctaaagtgactaatccactccatcatcccaatctccctaagcctctggatcccttcctctccattaaaccaagggagatcaggcatttccagcttgcttacagtgggccatcttttagtccatatttcagctaaccaagcaaataaactattagaacattttttaactcaccaagctgcaacattagaagcagagttcctatgtagtgggcccaaattaataaattcggcctgatccaactctgtattccttccaccattatcccacacccttaatatccattcccatgttcttcagatttctgtttatataaatgagaaaactcaagcagttcttttccagtgtagcgcacctcctcatgggtcacactctcaaccttacttctaggggcccgccgggactttagtctagttataggtctagaagcaaacaggcaggttgggggtggctcctgaggagaatcagcattaccttgcctggcaaccacctcaggggaggccatcactgttgcctcaggcggcacagggtttatctcttcagacaaaggtagaaaggctgatggcagcatgggtcggggaggggatgttgccactactggggatggggaagctgttccttctggcaaaaaagattcatcagagtttacaaattcagtatccccagcttcatcagtgtcttcccacatgttcctgttccaagttgcagggtcccattcttttccaatcaatctcactttaatagacacctggtgaggctgtgcatgcaccttctgttgcaggtcacccactttcatgataagagtttgtgcctgtttttccataattcccgctctttctctataggaaataagactttcacttagggcaatcttaacagacttgaggttcagtatttgcttctgaagccaggagacagaatccatgagtttatcattttctttcatcactttgtccactgaacttaggcgcaaccaatcagcttcattacgttccttggttctgcacatatggtcaaaggtattatgtatagagtcactaaactccttgcctctcatgagtggtgaattgggagtgtcaaatgcatttattttgtataactctctaaacaatccatgccaaggactatcagtgttctccatactattagaagtagaatccttagcatttttgagtctaatcatattaagcagccaactccagaaactcccaaactaatgaaagaactccattcttaaaatactgttcctctagaaccattcttggtaccaaaatctatatttgccagagttctctagagggacagaactactaggatacaaagtcccacaataagctgtctttaagcttgagaagcaaggagagtgagtctgagtctcaaaactgaagaacttggagtccaatgtttgagggcaggaagcatccagcatgggagaaagatataggctgggagactaggccagtctctccttttcacgtttttctgcctgccttatatttgctggcagttcattagattgtgcccaccagattaagggtgaatcctctttcccgagcccactgactcaaatgttaatctcctttggcaacaccctcacagacatgcccaggatcaatactttgcatccttcagttcaatcaagttgacactcagtattaaccatcacagagggccactgttctccagactccagaatgatagatccactggcagcttgtaccctgcacctggaaaagctacaggcattcaatgccagcccttgagagcagcattggggggtcgagccctggaaggccacaggggcggagctgcccaaggccttgggagcccagcccttacatcagtgtgccctggatgtgggacatggagtcaaaagagattattgtggagctatacaatttaatgaccaccctgctgggttttggacttgcatagggcctgtagccctgttcttttggctgatttctctcttttggaatggaagtatttacccaatgactatacccccattgtatcttggaggtaactaacttgttttttattttacaggctcataggcagaagggactagccttgtctcagatgagactttggactgtggagttttgagttaatgctggaatgaattaagactttgggaaactgttgggaaggcatgattgtattttgcagtgtgagaaggacatgagatttgggagggcccaggggcagaatgatgtggtttgaatctgtgtcctcactcaaatctcatgttcaattgtaatccccaatgttggaagtgggacctggtgggaggtgattggatcatgggggcactttcacatgaatggcttagcaccatcccctcagtgctgtcctcatgataatgagtgagtgagttattgtgagatatggttatttagaaatgtgtagcacctctcccctctctctcttcttcctgctccacccatgtaagatctaactgcctcctcttttccttccaccatgattgtaagtttcctgagacttccctagaagcagaagcagctatgcttcctgtacagcctgcagaacaatgagcgaattaaacctcttttctttataaattacccagtcttgggtattcctttatagcaatacgagaatggcctaatacaaaaaggtatacagtttgggagagaggaaataaaattatctttgcagatgacatgactgtctttacaaaatatcctacagactggcagaaacaaacaaacaaacaagaaacacctctccttgaaggaaataataatcaatataacaaggtttcagtatacagagttaacatacaaaatcagttgctttcctatacactggcaatagacaattgaaatttgaaattataataataaaatgtcatttacagaagtgataccctccttcccccaacgaacccaccaattcaacaacaactcacagacaaattctcttactgagaaatccaaaactagttgagagcctcctgcacccagacacatcaaatcccacaggaaaattcaggacaccctcatgtctgaatccctacccacagctcaatgccacatgattgaaaggaatcatagctcccagcttctccctggagagtaaaagagttggaccatgtgtatgacactcttccaacttcttcctccccaaaggatgggcctttctctttccagtcttggagcagtaatggaacccagcataatctagccatccaggggctggtaagaacaaagacagaagtttgcactgacagttaccatatcctttccctcagctcaacacagagcaagaaaatgaaaaatccctgcttccaacatcttcttgggaagggaagagttagtctgcttggccaatgccccagtgtttctgggagcttcccaaaggacttcctctgtctggcttgttttggggtacttatgggacctggcatactctagctgccttggggccaatgagaacaaatatggtggtttgatctagcatgcaactagatgatgcagtcccacccacaagctcagtgtagggtgaacaggtgaaaaaccacagatcccagcttctctctctgtgtgtcatgggaagagttggaaagggcatcaaatgattcaacttttctgggggctacttgaggaatggccccaatatcacttctattggaacactgattgtacctagcatactctagatggtagctgctaagaacaaagaaaacagattggcaggttggagaggccccgagaatccatggctgagctggttagtgagggtcttctcctttataagtttagtctgtgaagattgggagaggtcactgttttgtctaatataccaaccctacacaaagagtcaaggaaaataaaaataacatggaaatggattccaaacaaaggaacaagataaatctccagaaacaaagcctaatgaaagagaaatatttgatttacctaacagagaactcaaaataaccattatgaagatgttcaccaaaaccaagagaacaatgcatgaacatgagtatttcaacagagatatagaaagtataaaaagtaccaaaaagaatttgtagagctaaataatacaataacagctcaaaaattcactaaagcagtgtgacagcagactaaatcaagcagaagaaaagataagcacacttgaagacaagttattgttgttagaaattattcagtcagaagagcaaaaagaaaaacgaatgacaaaaataaagacagcttaaaggacttatgggacaccatcaagtggaccaatgtgcacattataggagttcttggaggagagaggagagagagaaagaaccacaaaacatattcaaagaaataatagcacaaaacttcccaaatctggggaagaaaatgcacattctactctaggaagcccagcagataccagatgaaatgaacggaaagaaacctacactgagatacattataattatattgtcaaaagtcaaggcaaagggagaattttcaaagtagcaacagaaaagtgatttgtcatgtacaagggatttcccataaaactaaaagtggatttttcagtagaaaaccttgcaggccagaagggagtgggatgatatattcaaagtgctgaaattaaaaaaaaaaaacctgccaatgaaaaatacttggcatgccaaaattctccttcaaaaatagagactttcccagacaaataaaagcagagaggctgggcgctgtggctcatgcctgtaatcccagcattttgggaggccacggcgggcggatcacttgaggtcaggagttaaagaccagcctggccaatatagtgaaaccccatctctactaaagatacaaaaaattagctgggcatggtggcaggcgcctataatcccagctacttgggaggctgaggcagagattgcattgagccgagatcatcgtgccattgcattccagccctggcaacagggcgagaatccgtctaaaaaaaaaaaaagtggagagttgatcagcgccatacttgtcttaaaaggaatgctaatggaagctcttcaagttgcaacaaatgacacaaacggtaacatgatagcacaagaaagtgaaacttggtaatgataaatatataggcaaattcagactactgcaaacactgtaactgttggatgaatcacttttaattataaagttaaaagacaaaagatattgaaaatatctgtaattaaatattatttaaagggatatggaatatagagagatgtgaattttaacatctataacatagtgtgtgatgggaaagaagtgcaagtgtagagaaattgaatgtaagttgttatcagtttaatatagactattttaaataaattataagatagactaatagatattttatgtaagccccatagtggccacaaagaaatacctatagaagatacaaaaaaggaaaagagaaagaaatcaaagtatatcagtacaaaatattcactgcaacacaaaggaagacagcatgagagagtaagacataggaggtcaaggtaggaggattacttgagcccaggagcttgagatcagcctagacaacatagcaagaccctatctgtaaaacaatatatttttaaaattagttgagcatggtggcatatacctgtagccctagctgctcaggaggctaatgcaggaggattgcttaagcctagataacaaagagctatgattgtgccagtgcactccagtctgggtgatcctgtctcaataaaaaataaaagacagagaaagaataaaaagacagctgtcagaaccacaagacaaacagacaacaatgaacaaaatggcaatagtaaatttttctctatcaatgcttactttacatagacatggattaaattcctcaaccaaaagacaaagagcagttgaatgaattagaaaaatcagagtaaactatgtgctgtctataagaaactcactttagatttaaagacacagatagtgaagggatggaaatatatattctatgtaaatggtcaccaaaggagaagtggctatacttatatcagacaaaatatatgtaaagtaaaaattagcacaagatacaaggaagaacattatataataatgaaaaggtcaattgaacaggaagatataacacttatatgtacccaacatcagagcatctaaatatataaagcaaaaatcgacacacctaaagaaataatacacaaaaaatacaataattataggaggcttctttaccccatttttaatagtggataaaacaaccagacataaaataacaaacagcagacttgaacagcactatagaccaaatgagcctaacatacatatataaaatattcatctcatagctgcagaatatacattcttctcaggtgtacatgaaacattctctaggatacatcacatgtcaggtcacaaaacaattcttagtaaaattaataggattgaaattataccaaatatctttttggagcacaatggaatgaaactagaaatcagtagcagaaggaaaactggaaaattcacaaatatgtggaaattaacacactcccgatatcctagtattcttcgcttaatgggtcaaagaaaagaataaggaaagaaattagaaaatattgaggcaaattaaaataaaaatacaacataccaaaacttatgggatgcagaaaaaaaaaaaaagaatgtgatatgctggtataggacatttaccatgaatggaattaacaggattgattatagctctgggtgagtcagtgagtgaatgtgaaggcctaggatgttactatacactactatagattctataagcactgtacacttaggctacactaaatttacaaacaaatatttttcttcaataaaaaattaatctgagcttactgtaacatttcgttttataaaattcttaattaaaaaaacttcttaactttttatgataatacttagtttaaaacacaaacacagccgggtgtggtggctcatgcctgtaatcccaacactttggcaagctgaggtgggtggatcacctgaggtcgagagttcgagaccagcccgaccaatatggagaaaccccatctctaataaaagtacaaaattagccatggtggcatatgcctgtaatcccagctactcaggaggctgaggcaggagaatcacttgaacctgggaggcggaggttgcggtgagccgagatcacgctgttatactccagcctgggcaacaaaagcgaaattctgtctcaaaaaaaacaaaacaacaacaacaacaacaacaacaaaaacacgttgtatagctgcataaagatatttgttatatccttattctataagcttttttctttttttttcttttttacgttttaaagttttttgttaaaaacgaagacacaagcacacacaatagcctaggtccttgcaggatcaggatcatcaacatctgtgtcttccacctccacatcttgccccactggagggtcttcaggagcagtaacacacatggagttgccatctcctaggataacaatgccttcttctggaatacctcctgaaggacctgtctgaggctgtcttacagttaacttttttttaatatacataagggtatattataaaataatgataaaaagtcagcacagtaggtttgtttacaccagcatcaccaccacaagcacgtgagtaatgctacgacattattatatcactaggcaacaacaatttttcagcatcattatagtcttatgggaccaccatcatacatgtggtccatctttgacccaaatattattatgctatacatgactgtattggaaataacaaggaaagaaataggagaacctcagttcccaaggtggagatcagttgttgttaaatattagagtgcgtcagaatcacctgaaggacttattgaaacacagattgctggacccttagagttgagtgtctagggtaggacctaacattttgtgtgtctaacaagtctccaggtgatagttatggtattggcctagggaccacattttgggaactatcggcctagattttctccaaaagtaggaggttaggtcaactgctgagaataagggaaagtgggcccttgaactctcctttcagccaaaggcaggcatgttctaaacactgaatcatgttaaaagtgaattttaatctgggggcaattctatgccaagccaactgattagtggtgggattaattcctaggttttagataacagcactgctttgcaaatgctcacagcttaatgataccatagaattattatcagcctcattttcacttgtgtaggaagaggcacggaaataaagaaggcaggagtcttctttcaggtttccttatggtggactctttcataagaaacagttctggcttctcctttgttgttccctcaaagaagattataaatatggttgcttgtctcccacctccatctgcctgagggctgtgctttgcttctgtaaatgtttcagttggaacatgttgattctgtttgagcatctattaacttaggtgtgatgtctaatgttcactgtctcaacgttcacctccactggggagagtggtggcgatttccctgcctctgtctaaggctggaaacattcgttattgtggaggggaaagtggttggttcactgaggtgggggctctgaaacacaggatgtgctttattgctcccacagtcagtcacaagttgacagtcgcatgaggctttcaataaaaatattttatacttttgtgctgcctctcagctgcagatcctaaagccctgttttaaagatcaaaatacccatagatgtgcaaatgccagggattcaacaaaagctggtgcatggatgggaaactgatgacacacacatctgttcagctctcatcaggcttcaccacccactggaatcttttggctacagaaactgaatttgtgattcgtgcttcaagtactgcagtcaacaactcagcaattcacaaagtctcttctgtgattgccgtcttaggtatgtgaggtaatggacaatggatatttaaaattgtgcctcaaccctgctttacctcatcacttattccggtatcagccaaatttatattagaatatgggaagtgcaggttttatataaaaggtgcctaggatagattctggcctatatagctctaataattggtataatactttacaatatagatgatattctcactgtaacacattatagtatacaacgtccattctgtcccctactttatttaaactcaactccataagaaccttgtgagatgggcattattccttaaggtaaaagaagaacaaacaaaaaatggctgcaaccaaaatgtaataattggtgtgaatagttttataataaaaaagaaagacttcactttggatatttgatggctgacacctttcagtttcccacctatcttcctttttctccttagccccacatcctgagaagataagagaacctgggctctcctccactggtgcccatggggaagttcaaaccacacaaatccctgtcctctaggaattctcattctagtcccaaccctcttaactatgataaaaactctaaaccatcaacaccacccccatcttgacttgtgtcaccttaggtagaatctgagcccttcaccttggggaatatgtgagtagtaaactttattttatatctgtaattcctatgttttattcatcctagcattcataaatttctgaggatgctggatgttcatataaataggtttattagctttagatagactaatgatgctttattcaaatgtgtggttatttcagatcaaagaaaaggaagcattgtgcttgacacagggctaagaactgaaaaatgaacaaaatatggcctgtgccctttccttagtagttatggtctggtagaaaaggcagacatgtacattaaaaaattataaaacagtgtcatatgtagcatgtacaagttattgtgggaatgcagaagagagagtggctggtttttccttggtttagcaatatgtgtgtaaagtcataagagcatgaaagaagattgtatgttgaggaaactatttttagttttatttggttggagagctgtattagtgtggagagatgcaatttgaaagggccttaaaggctctgctggtacattggattttatcctgagggcattggtgagttttgaagggctttaagaaatgaaataaaagaagaacacttttgaagagttcactttgatagcagtatggaagatagatgggagccgagacagaaagatacttgagaacaatactactttagtccaagtgagcaatgacaatggctaaatcaggacaaaagcagtgagaatggttagaggaggacatgtgccagacactgttccaggtgttgggatataaggttgaaagaggacagagaaattctgttttttatgatgtttttattctaataagggtatagaagagaaccattaagatccattctcttctctccagcagtaagaaaactccacagatgcagctgaacacatgactacccagaaaatagactacttttcagcctttgttgcagcttcctccaagtctagctatactaggttctggccaaatcatgcccttgaaatgaagaggcatcctcctcctttcccttttccctttctactggttggaatgggtacacagtgatgagatttcttgcaccatgtagccaaggttaccacaggcctgatagaacagcaagacaaaagggctctgaatatgtagcaacttcatggacagctgtcataccaggctgaactttaatgtgaaataactaaaattctgtcttgttgtttctgggtgtctcttcatcacagaagctgagcctacctcataagtaatactgggggagatatacagtcataatggagatttacatgaagagaatgctcaggtcttgaaccccacaaaggcagtcatctaagtgtataaataagttatataagtataagctgaagctgagtctcttaagcttaatatataattattcaaaataagtactagttgtaatttatatgcaaggaaaagctttgtagactgtctgagctagtcagtgagggctcctcagacaagaaagatccacttacgcaaggcacttacacgtgggagtgccagccagtgtgatgaaagagagactagagctgaatatctcatcctatgtctcattatttgaggaacttactaatcctgtattaagaatttggttaattatttgataaaggcatgagtttgttcattgagctgcaagctgattacagtagtaattacaataactaacaagaaaactatagaatgagataaatataataaatgaaataaacaaggtgatgtgatagagtaaatataagctgagcaaaagaatgctgctttagacaagtttgctacggaagtcctccaagagaggtgatgtttgattgatacacaaataataaatggcagttattgtataaaaagtagggggcagggtaggaactttataggcagagggactacaaatacaaaagctctgaggtgagaaagagcctggtatatcttcataggagaaaaaaggccggggtgaatggagaatggaaagcgcgtggggagaaagaaggaagttgaaattgtagagggagggagcaattagatcatcgaactgcttgtaggctatattaaggaattttgttttattctaacagcaaggggaagccattgtacagttttaaacaaaaacatgacattatttgactttaaaaaaataatgttttggttatgtatagaatgaaccatagaagcaaagtggaagcagagattattgcaggaaggtaatttgaaacagggtgatgccagagggaatgggaacaagtgaaaggatttaattgctttttagaaacattgatagggcttactatgagatgcaggtagaggtctgagaaaagaagtcttcaagaatcaatcatgctttttgcttgatttgctaggttgatagtggtaccatttgctaaagctgaaaacactcagggaaatattttttggggtataaaccaaaagatcaattttggacaagtataaaagtgttgatggctataggaaattaggtgtatgaatctgggtttcagacgagagagtgaaatttcagatgagagagagaataaatatagtattaatactttaatagctcattttatttataaaatatttcaaatatactaaaagtacagaaaataatttcataggcataatctcttgatgtacccaccatatagatttaacaaatgttgatattttgcttttttttgcttcagaactttaaaaaatataatgttgcagataaagttaaaggatgagagcattcttaaggatgatgggaagacagaggtttgaatgttatcttacttcttgttcactcccaatgctacctcttctgccagcagacaggtcctagaggataggaatgaagcctcaggttctgtcacagtcttgccaaggagtgcagaggaatttctcttctttgggaagaggagagcttgggcatcagcactgaagagccccaagattaggatcagaatgcctggatcctgggacagcttcgctctcagaaactcataatctcccacaaattcacatctaaagaaatataccaaaattcttatttccggattcctaaaaactgagaagtgaccaaacaggcagctggaccttttctatctcttgggttgggagagcatgacgaggccagagcaagaagatcagaaaggtttccttctgatgccttgacgtggcaccagcaaggtgtcctttaccagaggaaaaaccagaaaggagaaaacctttaagatatacctcatgaaatagagttactgggggaggcagacagtgacccatgacaaaaaacaaagtccttgggagattcaaatacaaaacagaaaaaaactttctggaaccaaaataattttaagaatttgacacaaaaatatgtatacattgtgaaataggtaaatgacaacatgtgcattacctcatatacttatttttttgtgatgaaacacttaaaatctattctcttagcagtttgcaaaaatatagtatgttggtgttaactgttgtcatcatgcacaatagatctcttgaacttattcctcctaggtgaagttttgtattctttgaccgacattgcctcaatccacaatctctccattttctctggcatcagccttttcaaatcaccttcctgcgatagtctctgcttccactttgtccctacaattcattctacccatacccaaaacactatttttcaaagtcaaattacatcatatttttgtccaaagctgtgtaatggcttcttattgctgttaagataaaacaaaattccgttccatagcctattagcaattaggtggtctaactactccctgcctctaccatctcaacttccttctttctcttcccttgcttttcattctccagacacaccgacctcttcagtccctgctaagcataattctactctccacttctgagttcaatttttttacactccatatataagtgagatcatgtggcatttgtctttctatgcctggcttatttcacgtaacataatgtcctccatgtccatccatgttgtcacaaatgacagaaattccttcttttttttttaaagaataaagaatatttcttttcatatatatgccacattttctttctctgttcatccattgatagacacttaggttgattccttatcttggctattgtgaacagtgctgctattaacatggtagtgcagatattcaacatagttatttcatttcctttagatgtatacccagtagtgagatttctgggtcatatggtagctctatttttaagtttttgagaaaactttctactgttttccacaatggctgaactaatttacattttcatctacactgtaaaagggtttctttttctccacatcctcttcaacacttatctttcacttatttgataatagccattctaacaggtgtgaggtaatatctcatagtggttttaatttgcatttctctgatgattagtgatgttgaacgttttttcatatacctattgggcatttgtgtttcttcttttgagaaatgtctattcagatcttttgtccatgtttaaaattagtattgagttgtttgagttccttatatattttggctattaatcccttatcagctgtgtggcttgcacatattttctcccattttgtaggttgtctctttactctgttgattgtttgcttggctgtacagaagcttttcagtttgatataatcccaattgtttatttttgtttttgttgctcatgctttcaggtttatacctaaaaaaagtattacccagaccagtgtaatggagcttttcccctatgttttcttctggtagtttttcattttcagatcttacatttaactcttaaatcaatttttagttgatttttgtttatggtatgagatgagggtctaatttcattcttttgaatgtgaatatctagttttgccaacatcgtttattaacgaatattctcattgtgtattcttagctcctttgtcaaaaatcaattgaccattaatgtgtggatttatttctgggctctctgttcttttggtctatgtatctgtttttatgacagcaccatgctgttttgattattattgctttgtggtatattttgaaatcaggtagtgtggtgccttcagctttgttatttttgcttaagattgctttagctattcagggaattctatggttccaaacaaattttagaattggttattttatttctgtgaaaaaatgccattggaattttgatagaaattacactgaatttgtagatcactttggatagtatggacattttaacaatatgaattcttcaaagccatgaacatagattccctctccatatatccgagtcttcttcaatttcaatgttttacagttttcaatgtgcaggtctttcacctccttggttaaatttatttctaagtaatatttttgtaggtattgtaaatgggattgttttcttgatttcttttgtggataatttgttgttagtatatagaaatgctactgatttatatgttgattttatatactgaaactttaccgaattttgtttaatagttctaataattttttgtggagtctttagggatttttatttataagatcatgtcatttttacataggaacaatttaacatcttcttttccaatttggatgtcttttatttctttctcttgcctaattgctctggctaggatgtccagcagcatgttgaatagaagtggtgagagtgggcatcattgtcgtgattcatatcttagagggaaagcttttgacttttcacctttggatatgatgttagctatgggtttgtcatatatggtctttacagtgtggggtacattacttctatacctaatttgtttagttgattttattatggaagatttttgaattttgtcagttgctttttctgtatcgagaggatcatatggtttttgattttttttttagatttgcatatgttgaatcatccttgcatccctgggataaatccaacttgattatggtgaatggcccttttaatgtactgttgaattcagtttgctagtattttgtgatgatttttgcatctgtgttcatcagggatattggcctgtaattttctcttcctgtagtgccctgtctggctttggtatcagtttaatgctggtctgaaaatatttatgtagctcaagagcaagattagatatagaaatgtggacttataagttttggggcagataaattgatagttgaatgttttatagacagggaaatggaatccacaaatgagtttctagaatgagaaaaggacaacatttgaaaggagggggaatgcaaagagcaagttaagacaatggagatgaccagccctgaccatacaagaacaagatcagagacaggaaaaagaagcaattaagcatactgcaggtaagtcatgtaaaataaaggcaggaagtgtagcttgggtctggagatttggagagcatttatgacttcccatttccccataggccctatgaatctagtagtcctggttcttacatggggagcattcctaccagagaacatgataaatataccactcaaagctatagctgctacctggtcactttgggctccttataccagtagatgaataagcaaagaaagaagttaacatattctctgggataatgtatcctgatcatcaaggaaagttaaggctgctgctaaatcatggaaataggcagcacatatattgcaaggagagtaaagttgagcaaaggcactcctacttctgtgccttgactccctgcccatgtgttctcctatttggactgtagaaccacataatggctattggtttaaagtgtattcctcatcctaaagtatagggttccatgctatagagtgtcattttcccactagcacctcagtggcaaatttgagtccattacatatttttctattgctggcagcttctggatggtgtggtggtcataggattagtgcactccctggctatttcctctacatcacacatcctttgctgtaaagtgatctcttggcctgagtaaatattttgtagattccaatttggttgtcatatgctttgagtttttggatagtgaactggctgagacactgtaggcaggaaaggcaaacccagaccaagaatacacgttaattccggctacagtaaacataacctttccctgggtgaaagggtccttatggaatcaacttgccaccgaatggcaggttggtctccttgagagatggtctcaactttgctttctgttgcaaggaggtccaacattcatcaacagcagttactaaatcagctttgaagagatggagcctatgccgttaggtccattcatagactctgtctctatcactgtggctacactgtatgtaagaccactttctaggcattaaggtggtcaagtatagagatttgctgacatatctggcccagtcatccttggggttctgtaggattcttctgcagtggattctgtctggtaggcacaaatgtacaatagaacaatccctgcactttgtgcccactctcataggttcatccatatgcctcttacccagaccttttcatacctggtcttccaatcttgtttatttcaaggctgtaaccagtcagctaggtaagtcattagtccttatatcccagttttatgccacttttcttctttccctaactactgtttttcagtgctactctgtggtacaacagcaattcattttcatcttacacccacacactgagttgatccatccatgtactaatcttgggctttttctccctcatcaacaggtcacaggaaacccttcatgaattcataggtgtgaaataggggagaagcattataacagtgacagaaagcatgcgggtttgtgacatatgtttgtgtatctttcttataccttcttacacctgctcaagtttgaccctgggcacatcctatccatgttatggttgattgctgctggggtcacctgattttatgatttgttggatctattggtatctgtggtgtgctagtaaatgattacttctgaaaaatactgccttggcttgtagcatttggtggcttctatggcataaatatgtctactatggctgatttcaagtgccaaactgatgtcagaatgtggagttaggaagagatgtgatggtatgaactgtctctagcacatcactatcttcagctggtgagagcagttctggtcacgtggtcacttgatgtcatttgagtttccatggtttgttactcattttctactggggcccaatggtatgccaggaattgtttatcaatagttcatagtcctgtactgtagatgtcatagccttgccctggaaccctagaagtgtgcactgtataaaacacattttgctactacaattaattccagtactataggtgatgtggtgcaagcaagagtcctggaccttatgcagacccatttgttgcctggggctcctctcaaaagttacacctctttgcatcgtttggcaaatagatcataacagtagtctcaagtgtattatatgttgcacctcaacatcaaagaggtctgctgaacattgtgattctctttcaaagctaggaggcaagatagtaatttgccctttactttggaatacatatcccaggatgctcagaacactcggaccctaagatgtttacctatggggcagcctcttgaatcttcctctagaacacacgtttctttccaaagcatccagaatacttgccactttttgcacatcaggcacggttaacatgacatcctcaatatagtggaccagtgtgatgttctgcagaatgtccagatgactcaaggctgtgctgacaatgttatgacaaagagcaggagaattaacacagccctggggcaagactgtggatatacactattatctgtttatgtgaatgagaacttcttccgatccttctttctgataaaaatgaaaaagaaaacatttgccagttcagtggcgacatacttttggtgtgcttggtgactcttggttaacaggtggtccacagtttttgcaaggccaggctcggctcgtgtattaaataggaccccattagggaccaccattcctgtctccttgaagacttggagggtggcactaatttttgccatttccttgagatgctgttatgggttgaattatatccccaaaggatatattgaagtcctatcccctggtatctatgaatgtgaccttgtttagaaatagggtggatgcagatattattagttaagatgaggtcatactggaatagggtggaccctttcccagtatgactggtatctttatcagaaaagggaaatttagacacagctatagacacagagggaagacagttatgtaaatctggaggcagagattggagttatgctgccacaagtgatggattgcctgggggctaccagaagatggaagagatgaggaagaatcctccttctaagactttggagggagcatagacctgctgacaccttatttttagatttctagcctccagaactgtgaaataaacttctgttgtttaaagccacttagtttgtgtactttgttatagcagccataggaaactaatacagatgcaatatatatactatatataatatatatgaatacatatacataaatatatatactatatataatatatgcatacatatacataaatatatataatcatatatatttataaattcattatcctcgtggaagtgtcttactggcatatccaggatcattctctgggcctttgctacaacaacagctataactttacaattcaatgaacaaagggttctgccaactgctaagtatgcccatcccaattgtacatttggaaattgtgcaaaggcccacccgtacccattgtgagacagacatggtttggactccggttgctagttgacttccatatacctctactcttagcaggagggtaatgtattagtcagggttctctagaatcatatatatattatatatatgagagcttattatgtattaacttacatgatcacaaggtcccacaataggatgcctgcaagcttgaggagcaaggatagccagtctgagtctcaaaactgaagaacttggagtctgatgttcaagggcaggaagtatccagcatgggagaaagatagaggctgagaggctagaccagtctctccttttcacgtttttctgtctgttttatattcactggcagctgattagatggtgcccatccaattaagattgggtcagcctttcccagcccactgactcaaatgttaattcctttggcaacaccctcacagacacacccagggtcaatactttgtatccttcaatccgatcaagttggactcagtattaactatcacaggcaatgatggtgtttgggatctttggctatcagcatcaatctgtattcacgtgtttggaaatatctgagtaatttacggattgatcgatggtgttgcaacatctttcttgtttttcagttgatgtgttttgggtcacagaactggctcaggcctaaaagctgagcatggaaataaggcttttcactgagcatagctgacctcaaacttctactctgccgtcacgtatctcttttgaatattcatattcaaatacccttattggctgcctatctatcttgcccctagggacaaaatgttctatgagccctttccataaattctgtgggtcatgccttgctgactcattctgaacttgctgtggattatagccttctgtccaccgctcttctattgggtacatgctgccacctagcctctgctcttctcagatcctatcatctccattgctattagggaacccactaccataacaatatctcacatcattattcccaggggtccttctgaccttattgccttgggcatgtcttatgggcctccctaaggaatatggtcggtacagggttttctgtctcatagaacggacccattgcttgcatgttgcttctgtgagccttttaagcccttcctccatcatttgctacagcaattctggcatctctattttgtttactgtaggcctttccttttctcaggctttcaaagttaattgtatcagctgattacagcaatcactggggctcttgccagggcattaaatcctgtgtcactggaaagtgccactatattgcaaaacactccctaacacagctgtatagcctatcttctcttgatttaaccccctgaggaaccacttccagttcctgatggtaacatgttatccatgtcttgatgtttttaggcatataatttcttttctgctttacctgtcccaacacttttgatcaggttatgctgagattttactctaattatgaaccaagagaggaagtggagcaagtcctgagaaggtaaagaaatgttatctaagatacctgcctcacttgatacctttgtataacttcaaacgtgtgtgtgtgtgtgtagctctgtcttccaataagagataattggtcacattttcaggtgcataggactcaggataacccaagatttgagattcttaactgtgtcgatacagatatccccatccaagcatcagggccccactcccttcagggctctaagtttgtgtaagagacctgcctagactgagatccagctttctctgatgcactgctaacaattaattttgttttctcttgttcttcaaccgtggctgccatccaggtgcagaagtggaagttttatttaaatagtgcctaggagttcctgttactctcactttgctaatttactttgttgattaatagacttgaacctgtcattttctctcttcaatcactggtgctgagcagtagccaaccaattccacattcttatagttgttatttcttcatatctctaaaacacccagagtattgtcgcagctattgcaccgcttccacctgtatcccatcacaggacagcataggtgaaagccagtaaaatgcaccagcattccaaggactatcaacattccacctatcaccagcaatagggttctcattatcatccagctggaaaatgatccaactccaggatccccatctttacagtctgtctcttagaagtgcttcttgtatcagtggtcatagattgggttccattcaggttagggatccttgtttaagtcacttattggggatgtgctcaataggggagtgagggaagcagaataggatggggaaaacgccaagcaagaatgtggtctcaggagggactagcttcagtctgatcctacaggacactggagcacaaattacacaacagaactagtcgtacatagagaaaaagaggctggccttgtgtatcccatgccaggaggtcattggctgagtcaaccctggagaagggagggaaagtggtgtatccacccaggcaaagtggcttccatctggttcagggcgattctctggaataggggtgagctgtttgttgttatctccaaaagtcacagcaaatgggagatggtacaaccagaaaagggaatgtgggcaaacaccagccacattcaccacaatattacagagctattaggaactataatgatcagcatgaagtttttctgtgtcctaggtaagaaatacatttctttaaaccgtctggaaatcttctatagtcttggataagaaggttgtgtttatctttcctcctttttagtggaattatactcaatcccaaatgcccattcactatgtttaacaagggaccgtcacgcaaatagcatctctcttcctggtctgctgtcaactcttcaagtctccacatcaaaaatgttattccctactgagttaactttacttttctctctccttacctttgttcttgcatataatggttgcagtgagggattatgagaacatctcctttcagatacgttgtcacattcagaattgtgtgatctagcatgagaaaggcttaacctttttcctttccatgtgccagtgaaaatttctttatactaatacacgttatttctgaaaaggggatgagagaaagggacaagagaagggatgatacaaaagtaatgtagaagtggccaagaataagatttggctttcctatttttttagtttgagtttggaaatttatgcattctttttgtttgtttttgatccagtaaaaaaagtgtcacctctcgtcaggacttcaatagttctgaagggtctggaagtaagtcattgtctcctgagttgatttaaggcagtttatgatgagagtcattctgttttttattccctaaaactctgagcatactgctgagtgaatagtctgtgctccacaactacttgaaaaatggtgatgcaggccaaagtgttttgaaaactgtaaaaatccatgcggaaatgaggtaatatgattgctttaaattgacctctccaaaggctctttcaccttttacctgttttacctgttttaccccatatatagatcccaatgttcttcctcctacttgatgcagaatgcctgtttcattttctcctttttagccataaaaattccaagtataattctagggcttggtttgaatcccactgtgaggaaacaaatcccgatactctaaggtttggcaatggaggatgaatatccctttagggaaaacgatggctgaaacctgtgggtttcactcgtgtctactgagattctcctaagggaccttcttttcttaggacagtgttttcaaagtgtagtccgcacgtcagaatattagcattactagagaacttgttaaaaatgaaaatgattagctctaccccagacctattaaattttgaaccctgattgtaggaccctgcagttcatgtttcagtaagccttccaggtgattgtgaggcccgctaaagtttgagaaccattgtcctagggaatcacttactgatcacttttgataccaccccattagcttcaggaagtcctcctcaacttagcactttacaccaaattaacccttaattgttgtggcacagtcaaaacatttaaactagctttcctacctaatgccttctccatcataaaaagaaagtgaattcctaacattaatgtataattaggccaggcgcgatggctcatgcctgtaatcccagcactttgggaggctgaggtgggtggatcacctgaggtcaggagtttgagatcagcgtggtcaacatgctgaatccccatctctactgaaaaaatacaaaaattagccaggcatggtggtgtgtgcctgtaatcccagctgctctggtggctgaggagggaaaattgcttgaacccagagatggaggtttcagtgagccaagatcatgccattgcactccaacctgggtcacaagagcaaaacttggtctcaaaaaaataaaaatataaaaataaaaataaacccaccagttttatagtcaggcaaactacactttgactcctgcttttcactcaaccacgttgataggaaggctctgcatctgttaaatgatggtaatagtaatatctaccttttaagactatggtggaaattaagtgagttggtgaatggaaagcacttagcaaaacgtctgactcataggtggttttcagtaaatgataacaaatcataatttagcttagtcatcatcatttcatagccccctatctgcagtgggtctcagagactagctctcaggccacctccaccgggcatggaacattttttacctttggaatttagaggcaaccctaagcatgtcttgggcccttagggtgtaagccaagagagaagcaggaattctcttctgtgtctaacttccactgtccaaattctaacttccactgtcttaagacccttctgtcacctaggatattgtttttgggaaacatcaggcccattcccaacatttacagggactgaagcaggagtacaaatggaaggcccacacatcatatatgtatttataatttacagagcaagctgaaaatgttttatactctgggtaggcaggatatcagcccacacaatcccaggaagctgtgactatgttacattatgagataaagggactttgcagatgtgattaagttcagggcttgagatggggtggtgatcctagataatctagtccgatgaaatcacaagggtctttataagaaggaggcaggagagtcagagaaggagatgtaacaaaggaagccaaaattggagttgtgcaaatccatgagtgaggtagtgggcagtctctagaagctgtgaaaaagcaagaaaagggattcttcccttgatccccagtgggagtgccttgctggcccattttagactgctgaccttcagaactgctccttaatatatttgtgttgttttaagtcataaagttgcagcaattagttactacagtgataagaaactaataaacctcctaccttcataacagtacaatttttaaaaaatgtgtacatatgtttttataagactgaaagttggcaaaatatcaatggtgattgaatttgattattattttgcataacaaatggtctttgaatgactcaataatatttgggtgaataataaaataaagaataaaataaagatacaatttattattattattttctgtttaagatggagtctcgctctgttgcctaggctggagtgtagtggcatgatcttggctcactgcaatctccatctcccaggttcaagtgattctcttgcctcagcctcccaggtagctgggattacagacatgccaccacacccagcttatttttgtatttttagtagatacggggtttcatcatgttggccaggctggtctcgaactcctgacctcaaatgatccacctgccttggcctcccaaaaagctaggattacagctgtgagccactgtgcctggcctcattaattatttttatctcataacacttatttttctttcctgtatttcagcacaatcatgagttatatggttcagagaacttgtttcttatacacagtattgccaaactaggccaccatacttgaattactgtagttcctagctaatatttttaaattattttcagtctggagaaacttggttctactgaggcagtagcaacctaattgtcattaaaactcttaaagaatactggattaagaaatagattattaagttatatatcacgttcatgcattataaggggattgtctatgatgcatgatctcatcatgatcttatcatgatctcagaaaaaaattaccaagtatttaacttaagcaagtgattactgttatgtatattttgcttttcaacacctacaaatcaatatctagatgcctagagttttacttaagtttcttttttcccccaatcttttcaatggtgaaatattagaagaaaattttaaaaacagaagtatgatgcttaatttgatcagttctctcactacatttgatactatttctaaataagaatgaccagtctgcaggttctcatttgtttgtgcatgaattcctttgtgttcatataaatattttctatttcctttttctaatttttaaatattttattgttgcatctcacatgtagtttatttcaatttagaaaaaagtgttcaaaatatttgcaaagactttgtattttttttaaaatgaagtagccaaacctagattgttagtgtttttataaacttctgccatataataagtggcaagcaacaattcatactgcatcaatttgtgattctcttgagaatcgcaaacaagaacacagagacataagaaaacagacgcttggcacttgtggaaaatggtgtgttattatacaagaatcttctgctttagttctgtcagagagggcagaattgagtaaatactttgtcttttcttttaccaaaatccttccctgtaccctggagccctgtccgtccatccatctcagatgttagtttcagcacagtcccgtaaaccttcaggcactgacacataaagaccttttgttctgaggactgggaagagagatgtagaaaagtgtttccctagggcgtggacagtttatactacatccactaaagtcaagtgcagttctgagggaacccttttatgggattttgcattctctacccatagaaatgtgtctttctcctcttattggaaaaacaacaacaaaagcatagaaatagtaatagaactcaccgcaacagcataatgcaccaagtggcacatgtgtgcacactgacactcacacaagtgaaaaactgaagcaagtcgcccaaatttgcatgggtaacagatttgggattcgagcccatgtctacttcacattgagttcattctggtacgtcatcttgcttcctcaagagcagggtgttatcctttctctggtttatctagcagcttacctgtatttgtcactcaaaactgactcacatttcacctcctggggaaggtgccccaattcccttttgaactttctacagtaacatgctcttcagtcatttatagggttacgtgctgttctcacgctggcctctgattctttgaggacaaggactgtgttttactgctttctgcatttctgaggcctaagagagcgcctggaatatattaggagctgaaatatgggataataagaaagctcttaattttaaaaaagaaatatgctaccactataattcagcatattaagcaataagtatggacatgaaatccagaagtcacataaattcatctttaggtcccagattgatagctgctgggatatttttagagaattttgaaaagattccacagttttcttcagcaatttattcaaatatgggccattctatactgtcagcaaattctctctgatatttaacctgaagcagtaacctataaatggtatgctgaggctctgagagagctggtataattgccaaagttgcagtcttactactgggatatatttaaggtttgggaaagtcttaattcagcacattttgaagagcagtatttttagttccttgggtgaatggtcctgttttaattcaggaaacaaaaggtgctggtttagctaacagtttgatttcaatctctgaagcctttccaccaattattttctttttcaagcaaaatcaatctttcctccatgttctcaagtccaatttatttaaaacacacacgtacatgtctgcaggcacacatacatacacacacatagtattacagtacaactattatatactgttttagatgtagatatagaaagaagtatagatatagattgcggtttcttgagtttctaagagtttccttattgtttgcttctccagtgactttgcaataacctagcaaacttccagtaaatgttcgcgaaatacgtgaatagtaaatgagagaaatgaggtggagcttgaaataatcctgccacctttgttcctatcactgtaaatgttatgtatacctgtctcttttcgtagaaagtcttgcacatatgtacccggagaagagacagtcattggtgtgattgctgtcttagagggtatgctcagcttgaactttaccaggaaacaacaaattatttttgaaagtgattgaaaatttatactcctaccagccatgtataaaggttcctatttatctgtgtactctctgatctttgatattgtcagacttaatttttgccaatctagtaggtatgtacaggtatctcattgtgactttactgaagactggacaattttcagatatttatttgctctttatttttttattttctgtgacatctctgtttagcttttttgttctcttttgtttttcttctttattactgatttgcaggcatttttacatttatgtaaatactaatattttgtctcaggctggcttgtctttttaccctctttctggtgcttcttggtggataacattcttcattttgatgtagttgaatttcatcacccttttattttatatggtcaatgctttgtgcttaaaaaatcctttcctaccccaactttataaatatcttttcctatattttctctaaaagttttaaggttcgccaccattcgttgactgatctttctctcagtaatttccaatgccatgtctgttacacagcaagctatcatttatgcaggggtctgattctgggctctctatttgtttggcctgtgtgtctgtccctgagcctaattagtaatttatatcagtaaggcattttctcctactctgtcactcttcagaaatggtgagttcttcctgctcctgtactcatcatgtaaattttaaaatcactggttaaattttatgaaaacctgttataactttcattgtaattgtattgaatttagaaagccatttctggaaattggcatttttttggtattgtgtcttcctatctattaacattctgtatttcttgatttatttaggtctgtcaaagtctttagaaaatatttataattattattcttaggtcttgctcctctttgttacattacttcacttttgctactattgtaactagtatattttaaaaatatatattttcaatctgtggctgatcatggaaataaaattagattttatattttgacattacaaccagctgtttgttattgattattatgcataataacttgtcttgagaatcttttgtgttttacataaaaatccattttctgcaaatattaacactgtgtttcttcccttctaatctttactcctttaatttttttcttgtaattgtattgggtgtttagtacagtgctgaaaagaagtgctattatagtcatgctcgtcttgtttcatattgtacagggaattgcaatcagattatgtctgttgtaggctttttatagatgcatttgattaggttatgggcgctttttgcgttcttagctttataagatttttaaaaatatgcttgtgttggattttttttaaattatatttttccctgcacttattgagatggtttttttaaaaaatttattgatatggtgataaatatattttctaatgataaactgccttttccttcctaaaataagctcaacttggtcaagatatattattatggttttaaatttatatttggaaagtttgcctatattttatttaatttttttgcatctagtttcataagtgaagttgactgatatttttttcccacattgtggtattttaaaaagtatcaatgatatggtaggctcttagagtgacttgaagattgtgccctctttttatcttttggggaagagtttaaaatttataaataatgtggtaggattcacctatacaatatctgggtctgatattttcttcatgggaagattttttaaaactgtgattcgtttttaacctatttaaagcctactctttattcttaatactgttttaatgttatgttttttctaataatgtgtccattttgactaagttttttagtatgttggtataatgtgatacacacacacacacacgcgcgcgcgcgcgcgcacacacatacacacacgcaaaataccatagtgttaccttatctttttaacctgttttatctgcagttgtatatctgcagtaatctgcagttttgtatctgtagttatgacttatatagttatatttaaaacttcttttgaaacaaatgttcgtaactgcatatcagaaaagtattacagaaggtatttaatcatttaaatttgagtgtgttctgtgcttcccagatgcagaaataaaatattttcttttgttttattttccaacacaagagggcagcattgctgcactgttaatttcctgtaggctaacaccgctgtgccttgtgtaggtttaaatatacagcacatctctttcaaatggataatcatttgaggattgcataaatgtggaccttgtctatttttcacttacatgacattcattgaaatttagttttgaaaacaatactctctgattagcatttatacatgttttatatttgcttcattgtttctgattctgtaacaatcacctcattctgagaagactaggtactgttgtgtttgatagtgtgtatgtatggtaattttctagaaatctgaatttttttaaatgggcttttcaatgatattactgagaaataggtagggtactattttgacataaaggataaagaacccacaaagtccatgagcttcctgtcggatatgagagattaaaactgctgctgactacaccaccaggtccatgtcaattaactcatttgcagatgggaggtgagagtgcaaaaataatattaacattaatattaagtaccattactggctactcattatagcttagattctttatttgctctacttagatttatttttataacatcatcctgtaaagtaggtattattacccccatttttacagatgaggaggcagaagcttgggttggctaactcaccccttagttcatgagggtcagaagagggtgctgattaataaatccccaggctttctcactactgcacactgcctcaccatcaacagcaaaacaggttgaattcgacgattcagtaaaaaagtaattttgatagttgagttcctttatcccttaccacgtctatttcacatatatgattattattattttggtagagatgaggtctttttatgttgttcaggctggtctcaaactcctgggctcaagcaattctcttcctcctgagcctcctaaactgcagggattacgggcatgagccacgtgcctggctcacatatttgatttggtctaggctatcttaacaaaatacaaaatgctttgtaaagtctacattttattattgcatttgctatttttagctctttatgtctgagcaattgtttaatgcctgtgcctgagaatctttttctcaacaggggaactgcgggggagattccagaagttccttttagagttgttgtttcactgtatcagtgcatcggtgactgagaaggaagtatttgcttttgtgtggcagcgcagtaaattcgcagaacacagttccaagaagcccaaggcactagcaagaatgataggtcaccatctccattatctgtcggtggtggatatggaagatagcattctatattaacttttgagaaagagaaagttaggcaagaagagattgctgaaatagattgtctgtgattgctgaggttgaaagttttttattcttggccaaggaatgtatcttttgggtttaacatcactttaggagtcagacagccttgaatgttagactgagctttgcattttttaggtcatgactttaggcagattccctgagcctcagattcatcatctgtgaaagaaagataagactaataccaatttatccaggctaaaaatatatataaaaatatattttttcaaacatacacattcaaaaataatgaccatatttttaaatgctatcctacgttgtgtcaagggcaccagtttctaacttagagacatttgcaattttgagcagtgtcttctgaggccactgggtatctctagaaagcttgaagtttaggagtaaacagaaaaaagcttgtgaacatgctttataaactgtaaagatttgtaaatatataaaatcattataatggctcctctctctgaactcaacttccactggatacatggcatatacttttgcatgtatcaacttagctcaaatcaataaaaaacatttttggactcctggtaagtccaaacatttattcattaaaaaaattattagggacctaaatgtacactgttttaggcactggagattggacaagaaacaaaacagatgaaacctttgcccgtggagcttgtatttgtagaggtgacatatgtggatcacacataggtaggatgtttcataataatatagagaaaaataaagtctaggcaaatggctagagaatggtggaggcttgctactttagatggaattgtccaaaagccttctttgaagagggaaaaaactgagcaaagacttgaatgaaagaaagaaaccagccatacatctgtctagaaaaactgagttattggcagagagaacaaaaagtcaaaggccttgaaatgaggatgtgtgcctggtatgtttgcaaaatggcaggaaagctatggtaaaccatacaaattattgggttttccatgtaatccattgtctctttgagagacgatatctattataatattataattttatagctcctcttttataggtgttcataataagaataaagataataattagtactttttgagtacttgccatgtgctatatttgtccttacaaccctcccaaataaatataattatccaccattatacagagactctaaatagctttcctaaggtagcatattcaataagttggtgaggcaacggtttgtcttatttcaagtgcagggtgcataataactcaatgggaagacagatgagtgaaaaatgcgtagtaatgtcagagggcttatgaaaggtacctagggaaggtgtcatgaagttacttagggaaggtgtcatgttatgccatagaggatcagttccttaaggaaggagaagatggattgggagtggagagagaatttcctgcgagaaacaaaggcatgaaggcttgaaagagcatggggtacatacgcagtaaataacaaacagttaagtgcggctgaagagtctgtagcatgcgatttaacacagatgcttctccacttataatgagattacaacctgataaacccattataagttgaaaatattgttagtcgaaaatgcacttaatatacgtaacccacagagcatcatagcttagcccagcttaccttacatgtgcttagaacatttactttagcctacggttgggcaaaatcatctaccacaaagcctattttataataaagtattgaatatctcatgtaattgattgaatactgcactgaagtgaaaaacagaataattgtatgggtactcaaagtaaggtttctacagaatgtgcatccctttcacaacttcctaaggtcaaaaaggggtcagttgaaccattgtaagttggggaccatctgcagacatgctcaggtgctactttgccaggcagggtctgctactgtaacataagacacctcccagccatggctgattggacagaggtggaactctgacccacaggtagcagaatccactgttttactagggacataggatgtgtgtggcttgactcaagcagctgaggtgactgaatcagattctgactttcaaaacattgaagcaaggatgcagaaactgttgctagtccatgaagggccctgggatagggagattatccaaatttgggtggctcaagaggtcattgggccatgggaaagctgattaggaagctatctacagaaagagaaaaatggaacaagtacagagagaagcaaagatggaatattatgaaacctcggagagaaatggagagcagcagatcctcagtttctgttgcatttccagttctttaggcctcacgaggcaggtctatgtcctgtcctagatcccagagatctttctatcccaaaattaggggggccatgtaatttagatccaaaatggcactcttttgaaagtgaaagtggctgctattaataattacagacgaaaacctccaaatcactgggaaaactgggttgtatgtggtggtgggctaggaagtatttaacaactgggtccccaggaaacaacagcaacaacaagccagaatttgattggtagtgtttgtcgatttccatgttgtaaatactctcaccatagctgatttccagctaccaactggcttggaaaattcctgaaaatttaataatcacctttctcaagatgcgacaagtcagctcccgtacaccactggatgcatactgccttacctaaagtactctccttctatactaaccccctgcccccacctttatttttacttgggttttgtgagtttatttgaaccttgcaactccaaaagcaccgattagaacagtagtgcgtttggccctgcgactgcaggcagtgggaggcctgcctacaagcctgccctccagctccttgaagagagagactattttaaacttccctttcctccccagcatgcccagcacagcgaggagaatgtcgcagctgtcagtaaatgcctactgcattaatgcttgaggtgtccctcattgcacccctgcagcaaggttggccagctgtgatttacaatttgcctgtcagcagtgggaaagtaactttgtgacagcagcaaacaccagcttctcagaggattttgagacctgggttctgacatttttacctagatgtgattgttgtcagcttatcatcccctgtcaagttctaggcttccttgagcagaaaatgaagtttattaactcagttatgggatgctctgactctttagccacatgggtgctaactgcttgatcagtgcctctccttagtgtgttcacattggcctgaggcgagccctgtcacactcattcttccttcttcaaataacacaatcattgccttccaaaaagcagaatcatccatcctgttttagaaacaaactggttacccaaactaattagctgagcttggactgtacaaatacctttttacctggaatccaggtttttctttacattttcctctcttttatccctatttatgcttgtatgtaaaaatctttatacatttgcagaaactggtaaattatcagaagaatttggtttctgtcagctttcctaaaagcaattattttccctgtttctgagaagtgataagaataaaaaatatttcctctgaactttctgaatatattattgttaaatgattgatataacacttacactgagaaaaaaatttattccaggtcaggcacatgggtgagctgacacacacatatactttcttctctagcagttctcgggtgaaagagaatcaggtgaaatgagaattctatgcttgtactaatactgtcttttaaagttgtttatttacaaaagtcttcccaggttacatgccaagcaataaaacggttaaacaattaaaaggtttccaagacaacttattgcaaagtaccataaaaagtcagctatgatatcacacttgtaattgaagactctaagtctcagctttcagtaagcatgcattagtatcaagaaggtcaagattcatggattctggtatttttggttatggcaagagaaattaacttttataaaccatagtgtgaaaatcaattcaccagaaaactctgtgtgtttacaatgtgtccattaatgtcctggctaatgtaaaatgatgaggacatgagtctaagtaatagatgttcataaagtggaatatatagagatgtttctagagcattatttaaattttgaaaaagaataacaattctacatctccagtaagtgagcatgatttaatttggacagatagtgaactgctatctgaccatttaaaaccatgttgtagaagaatatttgctgctgtgaaaagatattcagaatatattgctaagtggtgaattcagctacaaaacactataataacaatttttgcatattgtgtatgtgcatgtgtgtgtgtgtattacatataggactagaaaaatataataatttaacagtggttatacccagtggatatatctggggagagtgattaagtcatattgctctatttgcctatttgcatttttcactgtgctgtttttactgttgaagcacgctcggctgttttagttacaggagaacttattctcatgagtgtactgaattttgaaggggatagaatcttacacaattaactaaaatgagacatatatatgtgccaaatgtatggtgtagggtcctgtaattcattacattcctgcccttttatttagggacaggttttagaaaggtgagtgggggtaacctagaggagtgaaaacaccttgggtaacatgaattgatgcctgcttaaagagttaaggcatttcctcccccccccatggaaaaggagaacaaagcttttactgtacgattaattagaattcagctttgcatagtctgtggttacaaacttcagtgaaattggtgcaggatcctattctcaaagggttacaaagcacatattgttgtcaaagtacccagtacagaaagatagcatcctcagaataaaaattaagtacattttatatgaagcgatacacattagacactttcataggtttaaatattaaacagtggtgaacagttccaggaatcttgtgatttttttttttttcataaaatgaatgcccttatttcccagaaatccaagacttaacatttcttaacagcttatctgatgggaacaaacccaaactggcatgtaaatattatcaaccaggagggtttccaattaatagatcaaggtaaaacaaaaattacattttattcaacttttgccactagtgcttagcacagtgcatagcgtattattggcactcaacaaaaacatgcatatttttctttaagactgttgaataaacagaaccaacgacaaaaatcacgtgattatctcaatagatgcagaaaaggcctgcaacaaaattcaacaccccttcatgctaaaagctctcagtaaactacgtattgatggaacatatctcaaaataatgaaagctatttatgacaaacccacatccagtatcatactgaatgggtaaaagctacaagcattcccttttaaaactagcacaaggaaaggatgccctctctcaccactcttattcaacatagtattggaagttctggccagggcaatcaggcaagagaaagaaataaagggtattcaaataggaagagaggaagtcaaattgtctctgtctgcagatgacatgattgtatatttagaaaaccccatcatctcaggccaaaatctccttaagctgataagcaacttcagcaaagtctcaggatataaaatcaatgtgcaaaaatcacaagcattcctatacaccaataatagacaaacagagagccaaatcatgagtgaactcccattcacaattgctacaaagagaataaaatacataagaatacaacttacaaggtatgtgaaggacctcttcaagaagaattacaaaccactgctcaaggaaataagaggggacaaaaacaaaaggaaaaacattccgtcctcatggatagaagaatcaatatcatgaaaatggccatactgaccaaagtaatttacagattcaatgctattcccatcaagctaccagtgactttcctcacagaattagaaaaaattactttaaattttacatggaaccaaaaaagagctcgtatagccaagacaatcctaagcaaaaagaacaaagctggaggcatcacgctacctgacttcaaactatactacaaggttacagtaaccaaaacagcatgatactggtaccaaaacagatatatagaccaatggaatagaacagaggcctcagaaataatgccataatccgatctttgacaaatctgacaaaaacaaacgatggggaaaagattccctatttaataaatggtgttgggaaaacaggctagccatatggagaaagctgaaactggatcccttccttaaaccttatataaaaattaactcaagatggattaaagacttaaacataagatctaaaaccataaaaaccctagaagaaaacctaggcaataccattcaggacataggcatgggcaaagacttcatgactaaaacaccaaaagcaatggcaacaaaagccaaaattgacaaatgggatctaattaaactaaagagcttctgcacagcaaaagaaactatcatcagtgtgaacaggcaacctacagaatgggagaaaatttttgcaatctatccatctgacaaaaggctaatatccagaatctacaaagaacttaaacaaatttacaagaaaaaaaacaatcccatcaaaaagtaggtgaaggatatgaacagacacttctcaaaagaagacatttatacagccaacacgcatatgaaaaagagctcatcatcactggtcattagagcaatgcaaatcaaaaccacaatgagataccatctcacaccagttagaatggcaatcattaaaaagtcaggaaacagcaagttgctggagaggatgtggagaaataggaatgcttttacactgttggtgagagtgtaaattagttcaaccattgtggaagacagtgtagcaattcctcaaggatctagaactagaaataccatctgaaccagcaatacccaaaggattataaatcattctactataaagacacatgcacacgtatgtttattgcagcactgttcacaatagcaaagacttgaaaccaacccaaatgcccatcagtgatagattggataaagaaaatgtggctcatatacaccatggaatactacgcagccataaaaaaggatgagttcatgtcctttgcaggtacatggatgaagctggaaaccatcattctcagcaaacaaacacaggaacagaaaaccaaacactgcatgttctcactcataagtgggagttgaacgatgaaaacacatggacacagggaggggaacatcacacaccagggcctttcgaggggtgaggggctgggggagagataacattaggagaaatactaatgtagataatgggttgatgggtgcaacaaaccaccatggcatgtgtatacctatgtaacaaacctgcatgttctgaacatgtatcctagaacttaaagtataatttaaaaaaagaaaaaaaatgcatacttgattgagctagaaaatgtgcttgtctggaggtctctaatctgtgttgctaatacatagaatgacataatagaaagactatggaccgagaaaccaatactcagaccagctgcgattgagttctaacgccagctcttctgttaactcagtgtatgggttcttctccttgtggctccatttacccatttgttaaaaagaggattggactagattaactctaatgagagtatctttcagatcagaatacctaagggtttcttttctttctctattgccaaagctcatgtatttattaatgtattccacagatgcttattgaatgtcttctctgtatgtcaggcattgtgctatgtcatgcagaacaggcctgtaaacaaggcacacacagtccctggccttggggtcccttcctccagtgagaaagttgtgttccctcctactgggttgactataattttttttttaattcactcattgtttaaagcaagatcttagaggaatgggaagttattcttattgggagaattgcttgtcatcatagagttctctttgatgagatagagaaatttagaaagattaaactcctaaattgcatttccttgtgaattgttgtaatggaccagaataaacacaaatttggtgttttctagcattttagtgacagtgtgggtacacctcacattacaatgtaaatccattttaaaaatgcagttagtaacttatgttttattaactctcgtatttttagagtaccagagtaaactgaccgtttgaaggaatgcttcatatagtgagtcatattgtcatgtaattatgacccaacctatatttttatttcattaaaggacttttcttaatgcaaagcatctttaaacttccatgtaaaggagataattatattaaaatattcataaccacattttgacacagcattgctcgttttgttcctttgatctaatagtttgtagaaaatagaatgtaacaaattatctcatttaattttacctgagaaacaccgtactttttcagggtgtataagtcaggataagctggctatgatgctataacaaacaactccaaactctcagaggtttaaaacactataggttttcttcttgctcatatgacacattcatcttgggtatggatgaattggactgatcacaattactctggaacccaggctgacagccgccaccatctcaaacattttcatggtaagtgcaagagagcaaaaagagctctgagagggtctcactttggcaaagaattgtgtggttatatccagttataaatcactggctagaattagtcacatgctccatattttcacagaggggcaggaagtactatcctaccatctgcctaggaagaagacagctgggacacttgatgaataatgctaattactaccaaacacggtatggaagagttgttttcaggcattagctcccttaatttgctagagaatcaattaacacttggttagcttagcaatgtatttagttgaaaaaacttttttctgaatatttcaaagcactaacttttttgagaagatctactgcattgtactacatattgctggaattctagcaacatcttcaaattttagatttgtgacaatatttgtaatgatatgtattttatacttttgcccatggatattaatgacatttttactgtgattctcaaaagcattaaaaaagaagaaaggttaggtcatataaatggtatgattagttttgtttctttatttctttttcccttggtgtttttttagacgcagagttttgctttgaattgctcttccagtattattttgagagtgctctactagtgcttactcattttccattctaataacaattctaagccagaacaaataggaatttatcagaaaattatggtccactctcaactacttctaaatatcaatctcaaaagttcatttaataattcaactttcttaggtatagtaataaacaatgtataagtgccttttaatatacatcttaaagtattatttttatatttattaatacttgtattcatttataaatttacttatttaacaaacttttattgtactcatgtagcaggcattcaaactgatttagtggtttaaaatatatttaattgtatactaagaatttatgagaatttacaaatattttctttttttttttttctaagtaagtttgttgtgctttaaaggttgtacggttctattcttccatatgaaactgacaatacaaacctaaaaatgggaaatacattttggactacatgtccagaggcaggggctagactaccttctttcctatggctttttgcagaagaatgatacatgtatttggaagataaatggcagggaggtattagtgtaatatattgctgtcaaatattctgggattcatactttattcacttaaccagccaaaagtgactatgtgtttacagtgggtcttatgatttggtaaggacttaaaatataaagattaagacatgagccatattctcatggagttcacactcaactgggggaaatagatatgccaatatacaattaacaagtatataatgtaataagttctatggtaaaggtatctactgagcacaatggaaataccaaccaacctggaggcatcagtgagatcttccaagaatggaagtgacattcgattaggtcttggggtgaaatacactggggaagaaaggaaggagaacattgcatctataacaagcaatgcatgtataacaagcagcatgagtgactaaatgagtgaacatgtgaaaaaatgtgcacctggaggactccatacatgaggtgtgcggtgcagtagcaggaaatgaggccaaaggaaaacccgggtctggacaggacgggatcttggcttgagtttgcctcaaataagaaaggataggctaaaggataagagaggagaggctaaagagcttctggagaggcattaactaaagggattggaatttatctagtaggcatctgggatcattgaattgtataaagcaagagtgacatggtcaggctgttatattcaggaaaataagtaattgtagtgagagacagagaggaataaattagagacagtgaagcctggaggcacaaaaacttacatcttggcttcatcagcttaatttgccagtgactagacgctaggcaattgagataggtgactaatttttgtactttaatttataatattatgactatgtgcttagaaaatgacacctggtcctttaataacttgattgctttttctatataaaacatctccattaaattttctttgaagtaccaatgcattttctagaaagcagaagacatgttaatagcagcgattgcctttctctgctatgaacatctatgtggtactaagtagttatttaggcatctctattaatagacagtaataggtatgctggggagatttctaagggaatcatttcatgaagcaccttatatgactttaataaaaaacccattaatgaataaaggaataagttgatcaagtcacacatttgtagccaccagcatagtttggagaatgatatgtagtggaagtgaaatgaaaatgctgagagtgatatttattccaactatttccgaagtagaatatgatagtccctgaaaatattcagagaggatggtgttatcagcagtatgagctgtttttgagaaatcgagaatgtaaatgagggagaatgattcatgccaaaattgactaactccaagtaatcatctctagaatgcttaagtaggtattttgctatattcctgtagctataacaatatatcatttgaaagattttcagaaatgagcatcattatcaataatgaaaaaagtaggtcataatctctttttcctttggacttttaaatgccaagtcttgtatcttatgaatataaaatccattatctgtgttaccaagatatatccatcattattgcttctctctgttttgaaataacatcatttttcctaggcagactaggtagattctggtataaaaaatttggtaatatattatgactgtgcatttattggattttatgtttattttaaacttatatgttttgatttttaagtttctaaacatttaggtcccttgcactttcgcatagaagtgtgttttaatgcatatgccttgtggtcagatagccagttgttttgggaatcagtttgccatttagacactcagtcccccaaaaggccgggagaatattccttcaaatggcccactgggcaaatgtgtacacttctttatcttgccatattttggagaggatatttttttgtcaattgggattatgcatttgttagagcctgtgagttcttgggagatccgtgtatcttagctttttgagttttagaattttttctcggtataacattttaaaggttagattatttgggaagaggtgtgataaagctgaatatattcctgtggaagaaacaatttgtaatctggattagctttctttgacggaaagtagttttggccaaaaggtgacaatattcttcaactggtaagtgtggaattggatgagagacacaatcaatctgaaggtgtatgctgtttaccaaaaagtagactagaaatggaggaaaatgaggaattaaattctatctaatatactctgattcacttagtgtttctgcataactatttctggacattattttcaattttttcctttatttagatgcagttccactgtaactagtcttactacaagcaagccttttcagtaaagagaggagaaaatatactctactgttttttatttctttggaatcaaatgtttgttgaatgctacattgggccatgcatagagttgaacatgacaaattgttgctaaagaaaattctagactggtgaataatttgtcttgaatgttttttgattgcatttaggtaaagttgttggagcaaagtgttctgttggctgcaaatctatccattctgtttgtttcagaaaaacccagggctagccagctttgagcattagttaattgacaatattaggaaaaaaaatcagctccagaaccatttccattgattgggaagacacacagaattattccttaaagtggtcccatttccatagaaggaaactgaaggtaaatgagtgacagaattgcttcaacccacagataattatgaatgaatgtagatttactaatgtaggtactcaaactcagtgactatgtttatattgatatataaaatatatatttatctttatgattttatgtataaaataatatatactgtattttatagagtaactgatttttagaagagacattttggttggagaaagatgtttagagtgagacagctgggtttgaataaaacttcagtacttagtatttttcagctttgaatctcagaacaagagtttctttgaatgtacaatgggagatgaaagtacatatcatgcaaagttgttactatatttgcaaacttggacacaatagacacctaggaattggtagttattatccttttgctactaatttatgtttaacaaatattccagcgctattgtgatcagaagactgcaggaaggtattgtgggaaaaacactaaaaggaacaacacaagatctctctctttaaaggactttgatacagtttttgaagagacagacacattcatacatccaataaatcttaaagaattctaatctaaagcatacaaaacaatgcaaaaccattataggacataaatgtagcactgggtttttttttttcttttttctcttgagacagtcttgccctgtcacccaagctggaaagcaatggcacgatgccggctcactgtaacgtccacctcctgggttcaaacaattcccctgcctcagcctcccgagtagctgggactgcaggtgcatgccaccatgcccagctaatttttggatttttagtagagatggagttttgccatgttgatcaggctggtcttgagcttctgacctcaggtggtctgcctgcctcagcctcccaaagtgctggaattacaggtgtgagccactatacctggcctggaataatttttatgtcaccaagatggaaattttagatcacggttgccctcttttccaatttctacttagagatttcctccttacatgtggcgataataaagtacttttaataaactaaaaaatgttcttaaaaaccattatcaataattatgatgtgatcaatgacaataaatagactatttgtaattatcatggattgcttcaacctgattctatattaaggtctcattgttatttctaataaactactgattgctaaagctgcatttttaagttggctcattatataggaaatattcagatgttaacataactataggtgctcatagttgatcactctacaatgcttgggtgttgccattcccttctccctgggtcatggcagacattacctattaatcaaggcatctttgtttctattcattgcagtctcacaaaccttctcatgtcagtgtgatatggtttagatttgtgtccctgcccaaatctcatattgaattggaggagggatctggtgggaggtgaatgaatcatgggggtggaatttcccttggtgttcttgtgatagtgggtgaactctcacaagatctgatggtttaaagtgtgtggcacttcccccttgctctctttctcttctgcttcaccatagtatgatgcgcttgcttccctttcaccttccatcatgactgtaagtttcctgaggcctcctagccatgcttcctgtacatcctgtgaactgtcagtcaattatacctctttttttcataaattacccagtctcaagtagttgtttatagcagcataagaacagactaatacagaaatttgatactgggggagtggggcactcttataaagacagctgaaaatgtggaagcaacttttgtaactgggtaatgctcaaaggttggaacagtttggaggactcagaataagacaggaagatgtgggaaagtgttgaacttcctagagacttgttgaatggttttgaccaaaatgctgatagtgatatggacaatgaagtctaggctgaggtgatcttagatggaaatgagaaacttattcagaactggagtaaagttgactcttgctatgttttagcaaagagactggtggcattttgcacctgccctagagatctgtggaactttgaacttgagagatgatttaggctatctggtggaagaaacttctaagcagcaaagcattcaggatgtaacctggctgtttctaaaagtgtatgctcatatgcatgggcaaagagattatctgaaactggaacttatatttaaaagggaagtagagtgtaaaagttcagaaaatttgcagcctggccatgtggtagaaaagaaaaacccattttctgggtagaaattcaagcctacttcagaaatttgcataaggaaagaggagctgaatgataatagccaagacaatggggaaaatgtttccagggcatttcagggaccttcactgcagctcccattacaggcccagaggtgtaggagggaaaaatggttttgtggacctggcccagggccctgttgctgtctgtagccttggaacaaggcaccttgcatcccagacactccagctccagctgtggctaaaaggagccagggtacagctcaggccattgcttcagggggagtaagccccaagccttggtggcttccatctggtgttgggcttgcaggtgcacagaagacaggagttgaggattggaaacctccacctagatttcagaggatgtatgaaaacatctggatgtcaaggtagaagtctgcttcaggggtggagccctcctggagaacctctactagggtagtgtggaggggaactgtggggttgaagctcccacacagagtccccactgagacactgcccagtggagctgtgagaagaggaccactgtcctccagaccccagaatggtagatccatcgacagcttgcaccatgtgcctggaaaagcctcaggtactcaatgccagcctgtgaaagcagatgtaggggctgtatgcagtaaagccacagtggcagagctgcccaaggccttgggagcccaccccttgaatcagcatgccctggatgagagacatggagtctaaggacattattttgcagctttaagatttaatgaccaccctgctggatttcagactggcacggtgcctgtagcccctttggtttggctgctttcttccttttggaatgggagcatttacataattcctgtaccctcattttattttggaagtaattaacttgtgtttgattttacaggcttataggcagaaggggcttgccttgtctcagattagactttggacttggacttttgagttaatgctggaatgagttaagactctgtgggactgttggggaggcatgattggttttgaaatgtgagaaggtcatgagatttgggagggtccagggatggaatgatatggtttgggtttgtgtccccaaccaaatctcatgtcaaattggaggcgggacctggtgagaggtgattagattatgggggcagatttccccttggtgttcttgtgatagtgagtgagttctcataagatctgatgatttaaaagtgtgtggcacttcctgcttatctctctgtctctcctgcccacttgtggtaagacgtgcttgcttcccatttaccttccatcatgatttaagtttcctgaggcttcctagcaatgcttcttgtacagcctgcagaactgtgagtcaattaaatctcttttcttcataaattactcagtcttaggtagttctttatagcagtgtgagaatggactaacagagtgtttcaggtagtcacagccaactagtttgacttgacacatgtgataggatctatttttcatcccatcataagcatttttgagtttgagaaagttcacactcactatgttaactgaagctaccttgtagccctgtaaatctatttttaggaaacttgatctactagttataattctccctttttcttctggtctcattatatgctagaattccttgattatcaactctgaaaacatggcagaatgcagtggttcacaaatattggtgtgcatcagattcacctgaagacttgttaagggatttctgggtcccactccccagagtttctgattcagtaggtagcaatattttaaacaggtttagaaagcttttaagagatataaactcaagtgatgcctttggtgccaatcatggagccacatttggagaactactgacataatgaaaagaacatagacttaattacagagaaaaaagcattgagagcatcattactagattcttgaaactcaattgttttcaatgaagttttcccaataataaagcctgtatcatggaattacttgaagcattacctgagaaatatttcaaatatttagcagtaataacccctcagtgaatgtacattcactgtactttttgtactttgtgcactttgtaataaaaaaatcagatctaacattgttctatgtaccatagggaaatggagatggcgatgtatagttcttgttctttcttccatgaactgttgttacatattctaatcttcagaaactcactttgtgttatcctatacagcataccatatttgctctttgctctgaaaagcttgctttaggcactaaggagaaagttttacttttttactttgagtttggagaagtgcacaaatggtaatccagcaggtaactgtgtataaaagctgtggagccacattaggctgggatttccctctttacaggtaatatttttaaatgaatgtgataatacttagagcatattttacatcctgcaaaggagtatactattcaaatatttgtgccagattgcgttgtaaatgcagcaccatttaattttaatttaatttaatttttaatttttttttttttttttttgagatggggttttgctcttgttgcccaggctggagtgcaatggtgcggtctcagctcactgcaacgtccgcctcccaggttcaagtgattctcctgcctcagcctccagagtagttgggattacaggcgcccaccagcacacccgggtaatttttgtatttttagtagagatggggtttcaccatgtttgccaggctggtctcgaactcctgatctcaggtgatccacccgccttggcctcctaaagtactgggattaccagtatgagacactgctcctgggtgcactaccatttaattttaaattttcacttattagttcacttgaattgccctgaagaatacttggtccgaacatttacatctatggataaggcactgagaaacagaaagcctgaaggaatttctcaaggatgatgaagaacctggcttaggtttgatctcaaaacacagactccttataaataattcactcacttaggtcattctcctccatgattgctcttcagtttaccagaggtttaatttgtttccccaagtattttcacatgcagattctttatatattactgtatttttgtgcttagtaatcttaataaaaatatcaagagtactgtttaggaaatatgttatctatggcaaaatagttcttaattataatgtagtgtttttggacagtataaatgatagcttagaattgaaaagagaattactatgcttaccataaatctccttgacaacaagttcaatgttttgaatactgaatcatttagaattttatgcagatttataggtctctcaccttggcatctcattccttttttatacatctgggattttaacagatgtataaaatctgttataattattactgctttatttatccccataattgttactgctttaacaaatatttttggccgtccaactcatttgtatttgaaatgtttgcctagtttttactatcatcatcatcatccatcatcttcatctttcttcaatatttattgagctttgaaaaactgtgaaaatcaacttcaaagaacatcttgattactttactgaaatgaaggtccttattggaaccctcactccagaaaaaaagaagtgattcacagattctgggtcttctttctaagggatatataatgtcagttaggcagttaccatcccccaaactgcttgcttctcattttgtaatgaaaagaaagctctctcagcatatagtattctgtacagattgccttcctgcctttggcggagctcctgtttctctgtgaatcattccttggtacacagtgttaccattgtgttatctgaaagagcgaatcctgctgggtggtggtgccgctactccattgggaaggtcacaagttcatgtctgctttgccttctgtctagtgaaatgtgttcccactaaggaatagagaattgcaatatttttctgcttatggaaggtcaggcgttcagtggtaccctagcagtgttggctaaaaggccatcaatagtggcaaattcaaggcaaggcttaatcttgcctgttgtctatcattccacatgtttttttacacctcttctcagtggctgaaaaatgaatttgcttaaggacttggttgaagtgactgaggatgaagcaggaggcccttaatgggaccctggagtgaaagcgcttgcagtttaactaagtggtctttattgattaagcaggcatttattgaacatcagctctatgccagacactgctttaggtgctggagttactgaggtaaatgaaacaccaaaggtctctgttgtttcagggcttttattctagtggaggtgtcaggcaatagcaatggcagagagtgagtgacagaagctgttaggagattaaagctgaggaaggtacgagaaagggcagggctgttgttttacatcaggtcattagggacagactttctgaggagaagacgtatgaacagaagagaaccatagaaagatctagagagagagctttccagaaagaggtaaaagcaaacagatcctgaagtgagtgtgagtcgccatgagacgggtgccacaaattcaacatttgtttgaaataagaatattttgttgataatgattatacacatctatataaaatacatttgaaaacacgacattatgcacaaaaaaccatcaccacttttaaaaatatgtgtatataatgaaggtataaaataatattttctgtcataaatttttccccagtagagccatcatagggttaaaacaatatgttttatacataatgtactgtaactgcttttttaacaactgaaaatgtacagaaaaatggtgttttgactgtctatctttagtcttcagctgttgctgtcacgattcagaaatttggatctctgccttaagaagcacattttcttagctataaaaaaatctgatggaatctacaactgtaatcataggctgtgactttagaatataaatcacttgttataaaaggggggtgttggtgtttcttttcttttcatttgattctcatttgtgttctcaatatgctttactttgagtttgttcgtatttggatgaagataaaattttccttggcttcagtgtgtggcaagcagtgcccatttattttaatagatactgtaccaactaaatcccaatatgtgtcaggaaattcagaaaactgaacccagaaatgatgctagacacagatagaaaggaggacttcaaaaattcctacatgttactttggtgattggtgtgaaggagtactttatagtatcttctaaaagtacagttactttcagaaaaatgagaaaaatttaaaaagattaaaaaacacagtatcattagaatttggtctcttgcctctaaattttctaaattaccaaaaataaaataaaagaaatttattggctatagataatatagcacaaattggataattttaaatctcagacatgtaaaatcagtacagatttcacaccaaaacactatttgtagcaatagtagccatgagaattaagtatctgacctgggaggccccaaaatatcaatctcaggtgtgtccgttagaaggtaaaaaatctggaaatagaatcctgagatgatatttctacctataatacttaaggtaaagaaaaggaggtacataagaaacgtttctagattttaacacaagagacaaataaattctttttgacatgaaagacaaataaattttgagttgcaaatgagtgaacatgccaaggtacgttaaactaatatactttcttccaaaactggcttaagattggtaaaagtgcattcaggcgaaattatttttaaaaattactcattaataaaattttgctaatttttgttgcttattcaaattgctttgtgttgtcctgaaatatgaaattatggagaaacaattctagtttcaggatacaacttaattggagttaataggtttttaatacagtgtgttgtatttatgtgtatataaatatggcgtattcatgtttccttttttttttttttgcaataaagtatagtggattaaagcctaagttttgaagtcagatgtttttgggttccaatacttaccaactggttgaccttgggtaattcatctaatgtttctgtaattcagtttctttatccgtaaagtgtagattatacagttcaaagggggtattataaggttaaatgtgataatgtgatgataatgtatataaaattaactagtacatagcaaactctcaataaataatggttattatctcttagttcccagtggttctctctttctctttctgccttccccccaagaaagggctggaactgattcttttctcatagcccttagaaagaactaactcagctgatgccttcatttttggacgtctagctcccagaactgtgagacaataaatttctgttgattaagccacccagactgtggtattaccaagaagtactaaggtagtgctgtaaaaatactttaaaatgtggaatttggaatttggttggcagagactggaagagatttgaagtgcttggtaggaaaggtctagattgcctccaggagactattgttagacttatgaatgttaaagatgtttctgatgaagtttcagacagaaataaggaacatcttcttggaaactggaggaacggtgatccttattataaaatagaaaagaacgtggcctacttgtgttctagtttctttgtgaaaaatagaacttataggtgatgaacttggatatttagctgaggagctttctaagcaaagggtcgcaaacacatcctggtttctccttactgtttatagtaaactgtgaagggacagactacattgaagaaggagttgttaagcaaaacgtaaccagagtgtgaagactggaaaaattctcagcctatctacattgcaagaaatgagaaaacgtgttctggagagagcatcaaaagtgtgactagacaatcatttgctacaaagagaagcatgtgactcattaatccaatcaaccatctcagcaaaagacaggaatagatatgtgatcatccaggaaacatctgtgaaagaccctcttgtctggtggtttggaaccctgtgaattgcacaggaggccaacaagatttttgagagttttctatcagcagaaacactacaaactctgactgaaggtgacagaactgggatgaagtgaaggaaaatggtcagacttctgggattctacaagcaggaaatgggttgattgaactatctggctggttgataatgcagatagtttttaagaaaagagaagaatgatccagaaggtagtttagaggccagcagagctgcttctgtcatcattggtccagagagcacaagcctggcaacactggggccatcgcctcattggttccagaaaaataggaccacctccttggtttcagagggcaggtctggccactaatgctcaggttctagaaaactggtgccaccccattcatgggcccaaaggacagaacactgagccaaagaggattattctcaagcctcaacatctaatggaatttttcgtgctaggttttggacttatgatctctttcttccttttggaataggaatgtttgtcctgtgcctgtcccaccattgtattttcaaatcagataactcattgtctggatttataggtttccagatggagaagaactttgccgcaggatgaatcatacttcaagtttcacccataatcgatttggatgatttaaatgagatttgaggctcagagttgatgctggaacaattaagacttttggaggtgttgtgatggggtgaatgtattttgcatatgacagacaacgacatgaatttttggggtcagaggatggacgtttatgggtttgtgtcctccccaaatcatatgttgaaattctaacccccagtacctcagaaagtgacctattttggagaaaagatctttacagagattataaagttaaaataaggtcattaaggtgggtcctaagccaacatgactggtatctttattaaaaacggtaattgcaacattgagacagcataaagggaaagccatgtgaagaggcatagggagaaggcagccatctataagccacggagaaaggcctgcaacatattcttccctcacaaccctcagaggagccgattctgctgacaccttgattttggaagtctagcttccagaacagtgagacaatacatttctgttatttaaaccacccactcatttgtactttgttatggaagccctaataacgtaatatatactattgtgtatgtcagaggttcagactgtattatcaaaaaggatctaatttatattgtataaggatagttgaacgagtatagttatttaggatggaagagaaaagtattaaagaaaatatctttgcagggctatatatgacccaggaatcctacatttgggtattttccatagaggaatgacagcttatattcacacaaaaacctgtacacggatgtttacagaagctctatttataattgagctcaaaactagaaacagcccaattgtccttcagtgggcaaataagtaaacaaactggtagagacttacaatggaatgctatttggcaataaaaattaatgaactattaataaatgtacatcttagctaaacttcaaggacattgtgctgaataaaaacttgatcttagcagtttaaacgctatatgattccatttatatgatatgattgaaaagacaaatcagtgatggagaacagatcacagattgccagggattagtggtggcaggaaggatgtgactataaaggtgtagcagagaaagttttctgagggtgacacaactattctatatcctgaacatattggtaattgcaagaatatctatgtgtgtcaactttcatagaaccctacaccaaaaaaggtgaattttatttcgtgataaattaaaaagtaaaacaaaagagacaaaaatagtaaccagggaagctttcaaaaaatatatgttcttgttcaagaccagcatggccaacatggcgaaatcccatctctaataaaaatagaaaaattagccaggcgtggtggtgggcgcatgtagtcccagctattcagacggctgaggcaggataattgcttaaacctgagaggtggaggttgcagtgagccgagatggtgccactgcacttccagcctgggtgacagagtgagattccatctcaaaaacaaacaaacaaacaaaatatatatatgttatctttaaaagtctttgctaaaactctcagcatgcttacatatcaaatgtctcaagcctttgattttacatatgtaatattgcagtgttttgattatatgaaatattatattgaagtaaatttgattaactctaaatttaattttaaatttaaatttaaattctaggactttatagcaagtcttgacaaataaaattctattttcttcgttatgaactaatgagccatcatcattaatgttactgaaatttttaaaaattctaatatgaacagatttaaaataaacagactatgtagtgaaaaacaaatcttgaaattaagtcagctgatcttgatctaacctaccattttggaagaattttctacattgatatgtattatgtacccttataaggctcatagtagtaaaatattaatttaggaaaatattgtctctgtgaaatagcttgtgaatgtccacttaaacacataatggatctctgcatattgttctttttttaagagcagtggagtggatttgatttaatattaatgtgtgctatactctatgatctctgtagtatcacagttaactggacttatataggcaattatttacatttaaaattttacagtgtagattaatactatgttatttttttcttatctatttcagacaagactactgacaaagtaggaaataataaaaagataaaagcttattttagagaaagaggttttcccaaatataactttgtttctaacagctatgtccttaatattttattcatttgaaatcacccttatagacaatttgctgacaggttaatattatctttgggaactggagtaccctcttttagtgtggtttttacaacatctaccatgggaacagcttccccttccatttaggtatctgactcatccttgctaatatatcttgatttaatgatgacctagggaagaaagagaggaactcccttagtatttttattctatgtaatctgccttctcagaatgtgccttgtgaaagaagcacctaattactctgctaaaaccagaaagcactgtgaggagaaagcctggcaagtttctcctaccagtctgccacctaatgaatagaaattgcaacacactggtattctgcttttgcactgcggcaggaatgtgaataataataattattattattaaaagaacaaagaaatgttagctaaaatggtaaacatagataaactgctgtgatttaagaagtttccatttggaatcctctgtaagctcaagtataaaaaggatattggctgtaatcactttcaagacagtaacaaaaatgcagggctaatagcagggcatgatttgacgtgccaaatttatttttctttcatatatttaactgctaaatattaatcaatcagaatacacaatgtcagcctctgaagatacaaaggtgaatacgatagtttatgtccttggagagctcatagattaggccaggagacaaatgaaaaaaagtaccataacatatcacaaaacattctgagggagacagccaatgctggtggagtacagatggatgaaacagctgactcttcttatggaagttgagaaaaaatttactgaagagttttcctttgaatttagccttaatggatgagacatgacatgcttgacaaagatgatagagaaataacacttcagacagtgaaaactgcacaaaataataaatatacaacattttgaaaatgctactgcttaatgccaatatagctcttactctaatttgagagaaatagcttattccattttgtttgatccctcctcctttgtcttattctgcaccaaggcgatcagttatttattcattcaatgaatatttgtttaaatacctactatgtagcaaacagtatttggggagctgagattacaggatcgaacaaacaaagctctgttccttatgaaagttaaatttcaggaggagtaaacagatgataacaaagtcgttaagtaatatcgactatgataaacaagtaattaatattatacgctgacaagtactatggagaaaaatgaatcagaataggggaggtcggtaggtttaaacagggtgattatgggggacttcatgaagcaagcgatatttgggcagatgctgaaggagatgagggaacaaaccatgcagatatactgggaaaaaggaaacttgaacaacattttctgtgaacaaaaaggaggccagtgtggctgaagaagaactagggggagagttgaagaagacgaaataagagaagtactgcagttggagatggggaaacctcatgtagggacctcaaggccactgtgtagactttgcttttactctaggtgatgaggtgtcattggagggctttgagtaagcaattctttcttgaatgggaccatctctaagaaacatgaaaccatgctcaagcatctaggatacaagcctcccacctaggattcaggtgactctatcaggtagtatgggctaaaactgatctttctgaagcaccattttcctaaagatgagtaattaaatagcatcatatggataaaagtgaggtattcacatcatcttataaagatatcatgctagataacttcagactcaaggatgttaagtatatgtgaagatgaacttctagcaatatgactggatcaccgtgggagcatgaattccgtcttctgtcccataaggtatcctctgttataaaaagcttggatagcattggtgaagtataataaaatggacactatagttagagtggaaagacctggttttgagtattggatcaactgcttaaaagctatgcaattttattttttgatttatttatttttttttgagatggagtctcactgttgtctgcctgggctggagtgcaatggcacaatctctgctcaccacaacctccacttcctgggttccagtaattctcctgcctcagcctcccaagtagctgggattacaggcatgcgctgccacgcccagctaatttttgtattttttagtagaggcggggtttcaccatgttggccaggctagtcctgaaccccccacatcaggtgatccgcccgcattggcctcccaaagtgctggaattacaggtgtgagcaactgtacccggacttgcgtcttgatattcttatctgaaaatgggtataataatttacaaataatgtacatttggtctacaaatatttattgactgtctactctgtgccatagtctatcccaaattccagaaatacagtattgaacaagactcagcccagcccaaaaggattttatatttcaaacagggaatttcaacagtatttgtctgatatatttatgaggatcaaataaagtaatatattagaaatgcttactgccatatatggcactcagtaggaatgcaaaaaatgtaagttacatctctataattcttttaaagagttgccagttaattttctaagagagctagataaccatttttattcagttgaatattatcttcttttcaatcatgttagaataattctctagcttcgttttttaaaacaaaatataaaaattgggagaagttgcaatttgggggttgctgtagttatatataacagtatatttactgttatatactgttgtataacagcatacactgctggaagaggtatgttagttcattggtgctctgttaccttgtctttgactgaaggaagggatcttgtatagctttacttgaatagagtctaatggttgtgtgttgttttagaaaaaaggaaccagctagtgaaataaataaagacatgatcaataataattcaattttattaatattgatagtcttaaatctgttcctcttttaaagatttttttttaaaagcttctggattgtctttttaaaaaaagcttcttaattcattgtcttctcaaatatccagctttgtatttacaataagtgggaaccatgttattttgagtgccatgttgtgctaggtataatattattgtatacaaactgcagttttgtccatttaaaatacttttgttttataatagttgaaaagtagttactcgtagaaaatttattccaggtcaacttttaaagtttgaaggatattgaatataaaaagtatgtaattattttcatccaaaataattgtattacaaagatgttgaattttaaaaacattttaaaccaaagttatcatagtgtcactataaatttataatatttttggctgtaattaattgacctttcttttcaattcaatgaaaatcaaaatgtttccatttttccacaatatttataataagtaatgcattatttaattgttattgactatataactattcaaatcctttaatgatattttattatgataaattattgattcttattgctttgacaggatgtgaatatcagaaatttcattatttaaaactgagacaggctgggcacggtggcttgcacctgtaatctcagtactttgggaggctgaggcaggcagattacatgaggccaggagtttgagaccagcctggccaacatcgtgaaacctgtctctactaagaatacaaaaaattagccaggcatggtggtgggcgcctgtaatctcagctactcaggaggtaggatcgcttgaacccggaggcagaggttgcagtgagcctagacagagccactgcactccagcctgggtgacacagcgagacactgtctaaaaaataaaataaaataaaatgtaattgagttataaaaaataaataaacctgagacatacctttaattggatttctcaaataattctcaagtatctgtacattgataaattaattgggaattactcatttctccttctgaggtgccaagggctaagggttatacatgaaccggaaggttttcattttattcattagttccttcctaggcacctgacagggcaaatagattctatttgccttttctcctgttctcctggctgtctctctcaaatagtatactttgctgaaatatagcataggatttatttttactgtgcttatgtttactttttcttagatagcattggctatttcctatcttgtaggctcatctttgatttcaatatttggcaaagtgtctcatttttttttttttggcagtttggctctaaaaacaaactttcctcctcttgccttaaacattttttttttcagaaataagtaattcagactttcaaagagtccgattatcttttaaattttatatttcaattggctgtctttggtattcctatcttttttctagagtaggtagaattaacagactttacatatttttgtgaacatcacatcttagaatgattctcaaaatttctttacttgggaacttggctgtcatagtagggaaagtgaaaaaagtaatgtggaatcccacgtgatggcacataatttggcaataataattggaaagtaattataattgcactattgtactgctttaggtaagtttatgtcaacatttctttatctaaactccagttcacatatagctatatctgggttgtgaaatttgctgtaatatttttagaaagaaattcctaaaatgcttactatattttggcagttttgaaaagtaaatatgagaagtatcttttgtaacttcaaattgctggggttttttttgccaatacatcactatgaataatggcaaaatcacatattttcatgtcccagttttaaatcatattattgctggaggaaagtcccagctttgttttcataattcagcaaataataggtagcttatagccatattttctcctgtgacattactaatagtttgtcttctcaaatagggcagttaaaatatctttagatattaaaacatgcattagagcctacttgaacaaaattacaattttgtaattgaattaaagatcattccattgggaatcaaaaaacctgggttttagttttagctctaacatcagcagctaatatgattttaggtaagttgcttaaattctctagctctgttaccttgtctttggaatgagaagctgaacaaggtgattactaggattcagtgcaaatctaaaattctataactgtgcttttgttcataatatattttagttaattattgaaatgttctgctttccagagtagtaccgtaaaccagtaatttaaacccttcctactatgtttcaaccactttcccaagggctggtatgggtcttacttgctcctacatgtaggagttagtctgctcttatttagtcctttagatatttagcacattttagcctgaatatctgacacagatgaatgatttttttttttttttgagacaaaggcacactgtcaccaaggctggagtgcagtggcgtgatcttggctcactgcaacctccacctgcttggttcaagtgattctcgtgcctcatcctcctgagtagctgggattacaggtgtgtgccgtcaagcctgggtaatttttgtatttttttaaggagagacgaggtttccccatgttggccagactggtctcaaactcctggcctcaactgatccgcctgcctcggcctcccaaagtgttgggattacaggcatgagccaccacgctcagcccaaatgattttataagcgtagaagacatctctcacatcttagtgggagaattaaatgtctctctttttcactgaagtcttaccgagaatcatttcttttctgtcactcttgctgatcttgctgatgagccctagttctgctttgtcaaacttatttgagatcaggctggcccttgtgacaatcattgccggtatagacttttcataacatccagaaacttcaagcaccactatattgtttctacttcctcatatgccttttaaagtatagaagctgtattccaatatatatctacatgttaggttacagtgatctgcttttggacttgaggcattttttggactcgcctgtccgtaagtctcacttgcattctttgtgaacaaagaatacacccactctcaaatgtatatgcccacacacaagcatacagtatcttgtacacctatctgcacacacacaaacacatgcatagtgcttgactttggactctgtgctttaactgagagtattcatttttcctggttgttaccttcattccagttttgtgagctttgctgtcaaagtggctgtgcatctagcatagagtggctgctgttggcaacccatgaacaatgagcttaaacagaagaatgagggtaatgtttattgtaataaagattgggcattaaattccttgggggaatgaaccaaatccaatgttttcctgttcgctgacattttttatattgatgctgttttggatcttctggagaagggaggaaaaaaaaacttcagcaaatcagctctttcattcaaaaatggaattcagaaggctattttagctagctttttttgacaatcctggatttaatcagtttttactgtgatgaagacagttagcctcacaaattttgtggaaatctaaagcgatgaagggtgttgttaagggggaaacagagtgcaattgtttaaataatcctgggccaatagcatttggtaggtggagttactgttgtgtgcattacagagcaagataattctgaatgaagactttaaacattacacatgctggacggattctgggtctgctctttgtgcaaacaaaacaagtgactaggttttgcttactatccattagtgaatgcagcttgtttaataagattttttttaaaaaaatgcatgtaaaggatttatcaaaagcctttatgaatatttcatgagttgatatattcagctgaatgaattcagtgagtgtcagtgtgtagcttgcagacaaacctcatccacaaggaggctactgacattggaagcactttggcgcattttcagaggcaaagccagcctgataaagctccttgtgacagcctgacttgctattcttcgagtatgctgctcttgctctaagacgctcatacattggagtcacagcttcgtaaattaaactggaaatagtttgcagacttatcagtcttctgacctgcagcagtgtctctgctatgtttgagatttttgttttggatggtgaaagctagcactccttacaagacatgacagcaaaagattcttcaaaggaacttactgcttctgaacctgaggtttgcataaagactttcaaggagcaaatgcatttagaacttgagcttccgagattaccaggaaacagacctacatctcctaaaatttctccacgcagttcaccaaggaactcaccatgctttttcagaaagttgctggtgaataaaagcattcggcagcgtcgtcgcttcactgtggctcatacatggtaagataagacttggaggtatctacagtgcttttcagattctcgcattagcaccagtgatctagcagtgtagaaaatggaacatttgagttttgttcctaaaacatactgcaagtgtgaaatgaatggagaccaggtcagatgaagagtacataaatgcactgtgtgctaaattgtcattgtgctactagctttttccagataaaatatgcttttaactgtagagtctttaaaattactgcttatcagaatacatagctaattctaggtaagtcgagtaataaatgaatttttaaagtcagttttttgtttcatatctgttgaggtggtaggtgacttttttgttttgtgattgttagtgattttaaaaaaataattttgggacatgaataagtgttttaatcttagttctaacttatttttaagataatgtataaagtctaacttaatgtattgtaccatcatgtttatagcatataaaccagtgagtttttgatttattgacttatctttacaatacttaaggaaagggaaaactaagttcccacttctgaaattgcatggtcagttactttaatttttgattccaaaatgctgttatctttaagagcttctttttttaaaaaaatggactttaaaatttatagctattttttaaatacccagcaaataaattcaagaaccctctgtaaaacttgcactgagcctgccacctttaatatacatgtttacaaggtatgtaaatatagtagggtaacgtccttaaacagtataatgatgaaatgtaaggaaaaaacacgatgaaattaaatcacttttactgtgaaagccaggccacttcagatttttttggaggctatattttctttcagattaaggtacctttaaaaattgagtagctgtaccttagttttttctagcagggaccatagcaatatagggagcatgtacattttaaaggcaattctaacacagtgattttgtgactacatgctgggttgccaatcaacattataaattgaggagatctgatttttaaaaattaatattcacttgaattattttctacttatctaaaatgtttgtctgcttaatctactgtatagtgcattggcaaattaaagttacgcctagaaatatatagcttgcctttgatagataccacatgcttagccaacacatactttgcctggcatatatgatgtgcttattcttgctttctgacaatggactgttcatataatggctttattgcagattttctttggtcatcttcttgatgtattacatcatgttgtttaattgtaatctcttatttgcagaatacacgtggttagtctttcaaagcctactaatgatggtaacattgtataaagggaaggtttatgtataaggatgtactgacttgaagaagtcctctcttttgtgctttatcccacccctaacatgtatgtattttcttatagtttgctgagtagtataactgaatagggaagatattagttatgaaaataatatatacagaaaatacacaattaatagatgcacattttttcttgagttaatattaaattgctattttaaccaaaaggatatttaattttagatagctaatttttagataatgataagtcttcttaaacccttggtaatatttttctttatgtagagttttggttctgaacacaatagtgtgacctttctttttcttataatagatttttgatgtgctaagaacatagagctataaatactggagttttttacttttccaaagaaccccaattttaaaatgattaaagagctagttttactcatgcattatacaaattttctggcagcaaaaggaacaattaaatggtatctgaagttacctacgctaataagatgatattcttttagttgagttaaaacaaaatgttacaattgccaaaaaaaataggactttgatataatgctctataatatagattaaaataattcattaatcattaaacttgtgaaataactttagttttgactatgattcattttcacccttttttctttcaactcacacattccccttctgatgtttcttagtaaaacagtttcacagtttgttttcagctcatgactaagtctttatttatatttatttctattgttttatctgaatacatgcttaacatttttcaaatttattttcatacaacatgcaatgaaaatctctttctagaaaatagacatgtatcttacatatttttatgactttttcaaatcttaaaaattttgcctttcccggggaaccccgataaagtctctagcctaatgcttcatgctttccccttgcttcgcctttttgtctcttgagcaccctaacgtctttccaatgaatatagatggctctgtatggtctgctctacctcctgtctctaagactcgtgagaataataaacttttctttcttgagtttccaaaaaatttcatgtgcttttttacatagatgaaatggttatatgaggaaataagagcataagtactttatttttgcctctttgtcatagtgaaatgtaaccagcctttcacgatcaacaattggtatttttccaaaccatgcacttaagttagaaattccaagatatgcacttagaagtctctaaaaacatgttattactttacagtagacagtaggcttcttttaagaagattggattgttttgattccagcattgaaattaaagtaattttcatgatgaagctaaacaatgcagaggatgcagtttatatgcaaacccactaaacagtttttatttgtagatttcatatttcagtcagatggatgtgtagttctggctttaaaaacccaaattatgaactgtggactaatggcagaagatttaagaaatatttatgaaattctgactctgggctatttaaaaatatctgggggaaatgtggatattcaatgtgttatcactaatcagagtatttacaaaatcctaaatctggaaggaatttggatgattatctcattgcttccttttacccttgggcaggaccacaattactccatctttaacatatgggaatctgccctacttttaagactctagagaaaataattctaaaatctcacttagtatacaatcttactactttatagtccaggtactagaaaattatttgttatgatttatctatattatttatatattatatataatcttttttcccctcagtggatattattaataaaaaagatgcgtaagagcctgcatgaatctgaagatcattattaactggtgccagcgttttctttttcattcactcaacatatgtaattgagcactgctgtgagcaagaagagaaaaaaaatctgattcaacccacatgtattccaacacctactatattttaagttttttactagaatgtctgcatatgttatcccatttaagtttcatttggaatataagtatactccaaattcatgatcctttcaatattacctgctgcagatatcaaaagtattttgaattgctctagcttcttataggtgtttatactccattcatcattattttgactctgaatcactatctcaaatttcaaaatttttctttgaattttgaaacccaaaagtggataccatactctttgttagacgatatgagaaaatatagatatgaaacatgtaataagttgcaaagtgtcaatggaaccttcagaattactgaattggaaaattactgccagagttctcaggtcagcatagtatttatccccaatcccacatcagggatgacaacttatgaagcacagtgttatcctacttggcctgtatggcctgcctgtgcttgcctggtacttgtcacacagtgtccagcttttataaccttcccttctttgttgatatcccaacttcagtcgtcagttctctttcatcattagcaacttgatgctctctgaagaaagctactgcaatggtcttgaatatatcctgggcccactgcacccccctgacccacccccgccccccaccctgctgcattgctgctcctttttggagctctcttcttgtatttgtgaggactaccctctatctctctgtccatgcttgcacacaggaaacaatatttttgtaattagaagttagtaggagaaaagaggcttgtattccttcttctcgtttagttttacctgtatcttggaaatcttttctcgttttaacaaaggtttatgaagtctttacttgtctatctaatatttgaatacaaaagttttaaaagccatagttagtactctaaagggacttatatttggcaagacaacactggattaagtggagaataggaaaaaaaacagtgaatatggcatatgattgaccttagaactgccgacatgcttgctgtattatacaacttagtcctagtttgttagctaactctactgaatctgtgctagtaatattgatcaattgccttgaattctatcctggtaatattggaaattttttgagagatgtctgtctttacatgtttattgattcaacatttgtttgaacaaaacagttgttaagagcctactatgcaccaggctctgatctgggcttaggagacacaaaatgagaaaaagcccttgtcttcaaagaactcctatactagctggaagacaaacttatgcaataataattaaccaatggtgtgggaataatgctactgaagcatgttgttcaacttgtcatgagggcacagaagaaataactaccactagagagtgagtcaatgtgttaagggaagtttcgagaagagatgacatttgtgtggggttgtgacaaatgaataggagttttctaggagaaaagtgggcaggaaaggtattttttggccaagggagcaataattaggaaatcctgttaacaaataataacaataatagctctaatatattcagcacttatataatgtgttggatattaattataaatgtatttactcatttaagcatataaaaccccctgagttatatactattatattattttcattttataggaaaaggaataaaggtcagacaggacaagtaatttgttcaagtttacacagaaaataaacagctgagttgggatttgactctgagcacgagtgaaaatacacatagttcactggggtttcagcctaaggatgcaaggtgggaaagctaggaagtaagactgtgccagcagattggagccatttgctagggcttccaatatcatgaacaagagttggagttttagcccatccattctcggtgaggagccacgacaggttatgagaaggggattgccatgtattatttttattttggaaaggtactttgcaggtcaggtagagaatggattagaggacaaggagcttaaaggtaactggaaaagggacaatgtgcatttgagagataatgacttctacttattttgtatatcccgtaacattgaaaactatgcatatgacatgttttatgacttaacaaattatggtttatggaaactgggaggaaagcatgtgaacttggtgtctcttgcatttatcacttacaccatgatgctgtagatagtactagctggtacaatacccccacatgcatcaaacaatcagcaaaggtgcataggaggatgtgtgtatctgaggaaaaccctattagctcagtcctaatttactagaggtgctttgtattttactttaagtgcagactcctagtgggttaaaaaaaaaaaaaaagcagatattatcttagtccacaatctgaatcaaatggcagtagaaatctatgcctcatagcctgagtctgttgctttaatcagagcaagcattttatcagtacatctataaatagtgttttcctggccttttagtgtcatcaagtcttcaatatattggatttttaaaatacttacagtaaaaagggctttgcaaagtaatggtgacaacccccaggacacatgccggaaggtggcccagcaagcttgccagctgcctttctgctaaaggctaaacccattttgctaaatcccacttgcgttctctttccattcctttctgttttgttatctctcagtttttctccttggatgtttatagtgcttccttctctaacatcactgtcaatgcacttgcaacattatgctagaagcatttaagcgatttcttagaaaaaaatctcaaacgcttaccatggttttcaggccctacattatctggccccaggctgcttccaacctcctctcctgttctccagccctgtgagcctgctttctgttgttcagcaaactaagcctgtattcacttctggcctttgcacttggttttcttctgcctggaagaaaagtacctggatgttaacacggtttctccttatgtccattcaggattctactatctccaggtatcactatccggagaggcctttgctgacctccctatctaaaatagcaccctttcgccttttacttccttgtctttttggtacttattattacctgaaaatacattatagacatgcttatttgttatattgtcttatcctttcatcatctgccatccctgctaaatttcatgagggcagtgattctgtcttgttttcagtatcctcagagcatacaagaaaggcagtcatttaacaaatacttgttgaagaaataaagaatgaatatggtttctgtttcctgctctttattctatgagcatttttcctatagcttgatatgatggaaatggaaaggaagctttgttgatacttactctataagcattcttctccaatcatctctcaatagctgtgctctctttctgtcagtagagctactgcagcttgcttcctatattgtattctatgatattgcaggtatagatttaattataatatctcactagagcctaaatgctttacatagtagcctatttaattaagtcaccatgtacaaatcatacctcctagtctgtagtgctgtaaagtaaatatttgtctgtagcactgtacaattatttatttggtttttcttcattcatcaagtagcatggttggtgcatcagctcaggaaagctctacatatctctcaccaaatgcctgaggagaagtgttgtatgggggaatctacttgttattttgccttcaaaatatttacatagtgtacattagaatgcttaattatctatatttttccactgatgcaacatttacaatattaactctagcagcagctacagcaatttgagcttttaataggatttccccagggaacttggaagtaagaagtctatgacttgcagagtgaggaaattgcaagttaataacccttgtactctagaaaagacgtcactgagagggaaactgttcacttggttctgcctcattttttctttcctgaactaggaggttggggacctctgtcactggtagtaatttgtttgacataaatatgtttgaataccactgtgtactttaggttgaaatgaaaaataactcaacttctcaggttgcttcttcctggaacttagggagaatgaggatgactgcttctcaaaacctttgtaaagagaatgcctatgagatgatgtgctcccttgacagaccaaggcttgtcctcctcttccaaactatacctctcaaaactcagctttattgcaaactatgcagattggaagtcaggggatggaggatagtgtagcttcaaagagtgcttctttcaaactgtattttctggaaaatcagtgatctaggagccatttggagattcctcgaaaaagagggtggtgatgatctgtttcctggttctcggtcagaacaaagcaacatggatgattatatgcttggagaattttggaggattctcacacaaattctataatctccaagtacttgaaaaccaccagtttaagagttaaatgagtagagggagaaaagaaatctgtttagttgtgcttgataaagtcacagacatttccagataatttataatattaaaatcatcttcatctaatatgtccaggaatggcagcaggataaatgaggaggatgaaagcaactgtgggtcagggagacatcactggtagtgaacatttaaaatttcaaagttgaaagaatagtacaatgaacaccttttacctagatatactaattgttagtggtttctcttatttacctctttgtctctttctgtgtataaaatcatatatatgttttctttatgttgaagagagcacatttcgatggagagcaatagttttgggatcaaaagaaaaatattatttattttaaaacagtttccatgtatcaagcttgctgttattacaattcatccgtgtttttgcatttattagtaatttattcccttttattattaggtggtattcctttgtattgggtgtactacaacttgtttatctgttcaccaactggatcaaaatttggatttccagtcttttggctattatgaataaaggtgatataaacattcatgtatggttttctgggtaaacatatattctaatctttcttgggtaaatatcttagagtggcattgatgggttgtattgtgaagtatatgcttttttggttgttatttgtttttatttttttgacatggaatcttgctctgtcacccaggctggagtgcagtggcatgatcttggcttactgcaacctctgcctcatgggttcaaactagtcttgtgcctcagcctcctgagtagctgggactacaggcacgtgccaccacacccagctcatttttgtattttttgtagagataggttttcaccatgttgcccaggctggtctagacctcctgggctcaagcaatctgcctgcctcaacctcccaaaatgctgtgattacaggcatgagccaccgtgcctggcctatagtatatgctttactttataaaacactgccaaactgttttccatcatggatgtcccactttatagtcttactagctatatatgagagttcttattattctgtatgtgtgagggcattttgtattgtcaagttttttttaaattttcgtcattctaacagataagtagtggtaacttactgtgattttaatttgtgtttcccttatgactagtaataccgaacatcttttaatgtctttatttgctatccttatctctttggtaaaataaaattgtttatataagtcatgtatcaataaactttgcaaatattttaatttttaagagcacactgacatattggcaagttatgaatacatttgtagcaccggtttaaaaaagaaaactattaaaatatagtagagggctaaaggcatctatcataacatgatttttcttgctgataaattattggttttcatttcttaaaatggtttctaagagatgatgtctataagattcaaattttcttcctcaagaaggaagtttttttaaaaaaataaatctataataattttataatatatatgaaacactatataatgccttaatgtagtatactgtagaacttggggttctatcactgtataattttgacgttgtctggaatttatttttcatggtgaatctttgttttatgtgacttcatctggagttgagaatgctaggttgggtatcagtattttaccttgatttgctcttgaaactttagatcaatcctagaactaatttaattgtcctagacctcaattctttaactggcaaaatggagaaaagagttttatattcagatatttgcaaatgttaatttaatttaaaaaatatctacctagactgtgagttacctatttcttgagataatgtattaaagtacttagaacagtacttcaagcattataagttgtttaatagatgttactgtttaattatctgactaaatctctaaacatacacaaacattcatattattgtcagggttggttggtaaagcaggaactagtttttttttattttttgaaaagcatcagtatgtatggactgtgccaatttggaagagtcaaagtgcatgtgggttagtaaagaagtacatttataatatccacagtgtgacaattcagtatactaagaaacaaagtatcattcatttgctgtcatgtaataatcatatcctaatgaaccaagctaaattatactaaaatgcactaattatcagaagacccagtgtgaatagcttacattcccgataagaaattttattgtcttgttttgctctcatcaatacatttaaaaaaaaaaaacatttatcatcttcactctgtgaaagagataggaagagaaccactttgaagtcattccatccacttgtaccaataagcttaaaagtaacaagacaaagcaaaacataagaagatgccttgtctatttcaggatccgcatattaaaagccaatataggattcagtgaacaaatgccttggaagaattccagtgtcatcaaacttatttatctcaaaacgtctccttccatcctttctgatcctctacaaaattaataagctgagactatttgttgcagcacagaggatctgagcatgcttctgtggcttatttctgctgtaattccctcagcagtttatacaggaattctttatctcaccatcaggattctttaggccagaagagaggtcagagaagactggacaaataaactatgggatctaagtctttcttgctaaggtcctaactgcccaagacttcctcctgagagtctactgttgaaattcatatgcaaatttcagtttcatgggattaaccctggctgttgtctttacctgtcagcctgctcagccaggtgtgagttcacccataaaacagtgtctttcacatgctcatttatcaaaacgacatagagactttaggatgccaggtgatatgatgcaaaaagcacaacatttggtttctaactgcatcttttaccatacactgtttttgggcaaaccattcaacctatcttagaaaaagtagaaaaattagaaaaattagaaaaactctacttgtatttcattaggcctttatgaagattaaatgaagtaatgtgtgtatgatggttagtataatccctggccaatggcaggtaataaaagcagtccttagttcactaatgtatcgagagcttatgattttgtgtaaaatttatataatatgtatcataatgtaaactacttaaagatctttataacatggtttaattaaatcagtttcattgagcaaatgtggtgcatcttaaatccattcttttagaccacttagatattacttagtttcataggatatgactttatcataaagcacatattaattatccttaccacaataaaataaaaagtaataaatccttatgtgttatggtgtgtaatcactctcattcatcacagagaccattccaaattgcagattttgaccatagaataatcttttttctttaaaattccagttaccttcttgaatttgatactttctccattagtgaaactattaatagataccaatgaagcactgttttttttaagttaacgtaaaaaacatttaatggtcttttcaaagtgccagaacatctctgaagttgttttccttagtgggatctaacctcctagtgacttgtttatatcagaaagtttattcatgagaggcagtggaaaagcacctagggatctagattgacagaatctagacatgtttcctggcaccaccacttacaaactgtttatttatttgtttatttatttatttattttttgagtggagaaggagtagttctttaacctttgggagcatcaacttcctcatcagtaaataagagataaaacaatatcactgatttctctacttatatgattttatatgattatataacatttacaaatattaattagtatggttgagaagcatgggaaaagaaagataaagattactttacagaaagtaagggtactccatcattaaaatataaaaatcaaagagcttgacttaagtgccgcaggtgtatttcggtatatgtaaagagcatcccattaataaatattatcaaataccatacacattgctccagatttattttataaaagggggaagagtttctgctttatgggaccatgtaagtgagagactggagacaggagacagactaagtggtaccttaagatctcatctaccccacgggtctttatatcacttttagcttcctgcagaaagataataacaagctcatataaccaatatataatgaagtgaaagttgcctttattcagacaactttacagcatttaaatcaaattgctctttatttcttggtcatttcaaagaatatttaaggatgaaaacaaaaataaaggttattgcttctgctttgagaaagttttccttctcacataatctttgatcaggctattgtgtcacttggcaacttaaaggcaggaaaaagttatatctttaagtccagggattctatttaaatgaattgccattgaaaagtggttattcaaatcaactcacagcttagtaacattgaaaaataaagtaaactacttttgggtttcacaaggatcatgccaagtttctgggtctgtctaaattaataaaaataagacttaggaacctgtatggaaattgtagattaaattaagcaactgcttcatctgaataaagctttgcagagtctaatattatgaaggagctatcttcatgaatacagtgcttgcttgggattcaagggatttgagttttaatgccagctgaatccctaatgcccacggagcacatatgcattcatttgatgctggtagcttttctgtcaagtgggattaataattacctgctctaccacccttaccttatgtattatagtatgaatattcaataccagtgttcacggaatgctctgcctttctgcaaaataacatggcagaagcatttagaaaggaaaaaaagtttctaaaaaagttttatgcgtatcagattttcaaaaatgtgtctcagctttaaaatacattaatgaattttgtattttatatgaaccctaaaaatgctcttgccaagtacttagttatctgaaagctaagataattgttttgggtttcttacagctttgctgcatttgtgtatgttagtcctttgtcaatggataaacaccagattgacatcgcttagtgagttaactctgatgggtggctagtattttcgttttttattgattacaaccaacagatatttattgctggataatgcaaacatgaggcaccatgccatcaaggagctttaatctgggtaaggagagtatatagtcatttggcatgtcaaatgattaatttttcacagatacaagtgttaagagtatatcagtatagccaggcatggtggtttgcacctgtaattccaaccacttgggaggctgaggcgagaaaattgcttgaggccagaagtttgagacaagcctgggcaacatggtgagtgatatggtttggctgtatctccacccaaatctcatcttgaattatagttcccttaatcttcatgtgtcatgggagggacctggtgggaggtaattgaatcatggaggaggttcccccatgctgttctcatgatagtgggtgagttctcaacagatctgatgactttatgaggggcttttccctgctctgctctgcacttttccttcctgcaatcatgtgaagaaggacgtgtttgcttcctcttctgccatgattgtaagtttcccgaggcctcctcagctatgcgaaattgtgagtcaattaaacctctttcctttataaattacccagtctcaggtatttcctaacagcagtgtgagaatagactaatacagtgagactcccatctctacaaaaattaaaaaaataataaattagccaggcatagtggcaagtgcttgtagtgcaagctactcttgaggctgaggtgggaagatccttgagcccagcaattccaggctttagtgagccctgattgcatcactgcactctagcttgggcaacagagtgaaactttgactctgaaaaaaatatataaaagtataaaatacagggccaggcatggtggctcatgcctgtaatcccagcactttgggaggttgaggcagggggatcatttgaggtcaggcattcaagactagcctgaccaacatggtgaaaccccatctctaataaaatgcaaaaattagccaggtgtggtggcaggcacctgtaatttcagctacttgggaggctgaggtgggagaattgcttgaactctggaggtggagtttgcagtgagccgagatcatgccactgcacttcagcctgggtgacagaacaagaaaaacgaacaaaacaaccccccccaaccaaaaccaaacaaatgaaaaacaagtataaaatacaatgctctcccactgctaccaggtggaaatgatctaattatgaaactacaggtttgaagagcaatggttccacttctttttccaaatggctgtgagccttgagtctgcccctgttatggtgacatactgagcaattaatcagtagtgagctatacttgagaatctggtgtactagcaataggctaggtagtctgctgatgtgagcaggtaggaaatatctcctaagacagagggaaacaaattcgcattttaatttttttcacataaaaattaggcaatgatagaacaattacatcatatatttcttatatcatttagtcttcatctccatttgcagatgagaaagttgagactcaggaaggtcgattaattgataccaggtaaacaagctacaaagaaataaaccaagatttagtacatgtgttctgatttggagtaacacattttatatgctgacaaggtccatagatacagaggtatatcattacacaacccgccccatcccctttgcaacttccaactcccagctcctgtgggaaaatatccagggttactggattcacatgttcccttattaaaagcttcctcccaggaaggcttgtaaaattcatttgctcttacacataatggactcatggggtttaatttggggagaataaaccattaaactagaagaattaatttctacttacagaatttggcacattagagagaagagacaaaggggagtattttggaggatgaaaggttatgttccaggcatggaacatagacgatgggctgaatgtccaggcatgtcattgtatttgcaaaccattcattcactcattcattcattcattagcattgtcaaccacctgcttgattgtgcccatttcctgcctttcctgtttctatagatgaattatctgtgtacctggttaaggccaccccttactgtgcactgcattatatcagtactcacccacaagggctttgctcttgcacttgtccccgctgtctcctgtatcatcagttttccattctattaaatggtatccatttataaacatgctatttccctttaaaaagccctctttgacccgaggcactcctctatctattgctgtatttcatttctcccttataagcaaaactctcccaaataattgtactgctctactggtttcctctcctccagtcatcttctggaaacttctaaccaagttttctcctcacaattccactaaaagtgttcttcctgagattatgacattccatgtgccaaatataatgaccaattccttcacttggcctccagaacactgaatgtctttccttcctcatgggcttctctttctcggttggttcctcctcatgttcctcaagtctaaatattggaatgctccagagggttgtggacctcttcatttttgtcctataataactccctaggccaagtatctcaatctaaataacatccgtatgctgatgcttcccaaatttatatctctagccagacttttcctctgaactctagatctatgtctctctccagcagccttcttgacagccaaaacttagcacatccaaaatggacatcatggctttctcccccctacaccatgcccttgatgtaacatgttccaaatcttttccattgcagtaaaatgcaattcaatttttctaattactcaggtcagaaatcttggagtcttgcatgattcctgtttttctctgatatttcccatttcaaatgcatcagcaaatcctatcagctcaacattcacaaggaagcgagactgtcaccacttctcatcaccagctgtcgctgttctgatccaagtaaccattacctcaaacctggattatcaaattaacatcttactggatctcccttctttcattctttcccctttacaattaattcctcttgtagctgccacagtgatcctttatattatctgatcagttgtttcattcctctattcagaatcctttaacaacatcctatttcactcagagtatgggtcaatgtgcatgtaccatgcctacaaatctaccctggtctctacctattacttctccaactcctttccttcccctcacaccatcccagccacactgctgcacttggttctcaggctaagcaggatttcttatcaagacctcggccttttcttgttgtcaagaaaaaactttctccagatatctgtatgggcttttcttttcttatttcaggtggtgtcttgaattcatctaattggagaagactttttggccatctataaaaaatagcagtgcacatctttgcctttctaccatcattatccctgatttgggttctttatagcacctgatgtatatatctacatatatatgtatttttctatatctacatctatttcatatccatatgatctgtatctttatctatctatctatctatctatctatctatctatctatctatctatcatctatctatctaatctttggtattgtctgtctcttttctctctccaattagaatataatctccatgaagacaaagaactttgtctattttattcatttctaaatcctcaaaactagaacacatggtagcacatggtaggtagttaatacatatttattgaatgaataagtgaataaatagacaaatgagttgcagactgtttgggtaccttccagttttaagcactgaggccccatgttgaatgggagagggaaatgtgaacagataatttaaaatattatgtgataaataaaatagtaaaaataactattgcctttcaaagtaattttatctggaaatataaattttaaaatttaaaaaatattatataaaatttaataagagattattttctttataaagagaaagaggggcatttggcaagtatactaaacttaatagcaagaaaacttaaattcatattgtgattacattgtttactagctgtagaatcttaggaaaataactcatctagtctcttcctcccattgtacctagtatactatctaatttattttatagttgtgaagatttagtcagataatatcatacataatgggcattaagtagatattatttttatttctttccatatctaatactatactttacattcataggttaaccttctgtgatctgtcttattcctctgcaatttttcaatgactttctaaattcccacttcattgactttcttccattttcttcctgtgagactttttgacatcatgtgatgccatactcagcctcatcatccccacgaagattaatcatctttctctccttgcttcaacaatattgcatgtgatatttagctctatttctatggatggaagcaaggagagaaagatgattaatcttcgtggggatgatgaggctgagtatggcatcacatgatgtcaaaaagtctcacaggaagaaaatggaagaaagtcaaggaagtgggaattttgaaagtcattgaaaaattgtggaggaataagactgatcacagaagtaacctatgaaagtaaaggaatcatataatgtgtactcttttgtctatttttttcactcatcagaattactttgagattcatgcatgttgttttatgtatgcatagttaatcctttttattgctgaacactattccattgcatggatataccaaaatgtgtttattcattcacttgttgacaagcatttgtttttatgtttttttgctattacaaataaaacattcatctgccaaaaaaaaaaaaaaaagaactggtgagttctttagctctatttctatggatggaaagctggattaattttcaacattgtaggacagtaataagtgaatatttattctttaattggaattatgtttctttgagttgcttgtcactaatacgtagtgaatcaatggaaatgaaaaggacactcataaagtaactgcatagtgagtacataaaccaaaaccatggctatctttttaccctgtgctacagcaaggctagtgaaacaagagcaacatgaatatttttaagaaagagtatcacaatggtaaattttatttgtagggcattatgtagaagagaaaattttcaggaataattatattagactcatctctttgatgacagacactatttcctattcatattgcaaaataattggcaagtacatgttttaaaaaaatgagtgttttttttcctgtgagacatctgtattttactacaggtgggacaaagttatttcggtccttattttgccactaggatattggcaggcagagggtgacaaaataatgtaacatctgaaatttcaggctatgaggaaactcacatacatacaatttgtcagacaattaggatatttctaaaatgtgaacagatgtataatagaaattagcaaaatgaaaaatgacctttttttgtttttgatggatacataaagaatttatatgcagttttctaggttagcctagttaaaacctcttctttctacatattcagttaagaaataattgttaattgagaccaagacattataattgtttcccttttgtattataataatgaaaaatatcaagaattatatcttataactttttacacaggtccaagtgatgttttctgaacttgcatgccacatttttttagccaagtgttcaccagttgggaactcctaggggttgtttatttttcagtgaaagacaatcttttaaggagtttatgtcctaaatattttctggttttgcagtagcatacatcagacatagtcattgtgtttggattgggattttcacttttaacatgttctcaaattctctaggcgtttaatgtttccatctggtcctcataaaaggtttcacatttgtaatgcagctcaggctcctactcagagagcatcattataattctatccatgactctagtttgatagagcagatacttttaaaactttggatttgttttttgcttttgtgttctgtcttaaacctaggaataacacttgagtttaatggttgtttctctctgaaaataatcatagtgtgcacaccatgacaacaggctcacaccccacttccttctgtgccgtttgaagctcctagggcagaaggagtaaccacattgtgagcccagtatgaggaaacttagcagtcgtcttactttctcttcattaaacaatctgttctcagtcatcacagatggagaggatattttcaaggacttgaacattttcttgaaatagccaaacaactaggaatctccttttgccatgttaaataataggttctagggcacaatttgagcaaagttcacagcttctagcaaggtctttttatgtagttaggtgtgcagtgcatgtggatttgtttagtgagtatgtacttaagtaacactatatgtcaggcaatgctctaactaaacttcacaaatagtaactcatttaatcctcacagtaactttatgaatacggtactattagtatccccatccaaggatgtagaaactgaggcataaggcaaaaagaccacagctagcaagtggaagagccagaattaaaacctaggtggtctggctcaagaatccatggtcttaactgtgaaactgtgctatgactgaatgtgttcagtgtcagattttcaaagatctattattatcttcccagaattgaattgcacactttgtgtaactctccccaacaccattcttgattcataattggtactcagtgaatgtttttttaccttaggatttaattaagagtgagtgaaatgataactgattttgccatcatttgaaaaaaaggcagaaccaaaggtgaatcataatggtagccagtggacaggcagtttttcattcagaagtgtcaatggatcccgttatccaaggataacctatatttaaggcccagatacttctaagatgatgctttggattctacattttcaaatctggaagaactatcttcatttcactaattgttctttactgatacagtttttttaaatttaagtgtggtgaaacacaacccaaaatttaccatcttcgctatttctaggtgtacagttcagtagtgttacgtaattcacattcttgtgcaaccagcctccagaactcttttcatctttcaaaactaaaagtctataccacttaagcaaccactcctcggtttttcttccctctaagctctcagaaaccaccactttttaaaaaaaaaataactcatccacctatggaaatttaggttgcttccaccttttggctattgtgaataatgctgttatgaacatggatgtaaaaatatctctttgagactctacttttatttctttggggtatatacccagaaatggaagtgctgagtcatatgataattctatttttaatttatttcccatacggttctccataatgactgtatcatttgacattcccaccaacagtgcataaaagttcactttctccacattctgaccaatatttattattttctgttatttttttctgatagaagttatcctaatgggtgttagatggcacatcatcttggctttgatttgtattttcctaatgattcgtgatgttgagcagcttttcacgtgattattggccatttagtatcttctctggaaaatgtctgtttaagtcctttgtacattttaaaattggcttgctgtgttgttgttgagttgtaggaattctttatatattctaggtattagcccattgtcagatatatgatttgcaaatattgtctcccttctgtggactggcttttcactatactcttgtgttctctgatgcacagaatttttacatttttatgtagcctaatttatctactttcacttttttgcctatgctttctggtgtcatagccaaaaaatcattatcaaatctagtgtcatgaaccttttcccctatgtttccttatagaagttttatagtttgggtcttgtgtttaggtttttgatccattttgagttgatttttgcatatcgtgtaagattagagtccaactgctttcttttgcagtatccagtatcttttgcagtatgttttgttggtacccagctctcccaacaccatttgttaaagaaaaaaaccatacagatttaagggaaactcagaccacatagctataaacctggagttcctctcatactttggtccaaaccataatagatttagaaagaatcacgactaaagttctcaactgggggctcttttctcctggcgagaacatttagcagtaggtggggacatttttggttgtcacatcttggggtgggagtgggggtagcagttgttactggaatctagtgagtagaggttacgaatgttgctaaataccctgcaataaacagctccctaaagcaaagaagtatctggcttcaaatgtcagtagtgctgaggttgaggaaccctggcctagagtatagggaagtacaggttatgttgtaggactggaaaattggggaatctcctttttttgccatttgagggcttgatgatcattgcacaggtgactacctaagtgtccaattattgactacttggtagttggttttttaaagatacctgaatttcatatacatccagttaggttttaacaacagaatgctattttgagcttaacttttgcctttaagactgttcttctcactttctttcaccataattttgtccatttatgcattcattttctcttttctgtaagaaaacaagtaaataattgtaggattgatcataagaattggagtcctattagactatacaataatcaaggattacagaaatgcctagagattgttttggcctagctgctcctcctacttctgagctacttacaggagaaagatgcccaattgacaatataaacatgaaattaattactttataataaatagttaatttataacacccaggcttgtgtttaaaattccagagcttggctctctgctgaactgagctggagtacacgacttcagcccaaagtaattttatattgggtgtttatggtcagggaaacttcgttgcagaggtcatgcttgagctgagacctgactggctaaaagcctcaagccatgagaacatttggaagaagagtatttccacaagaaaaaaaaaacagaaaattaaagtgcaaagatcttaaggtaggaataaacttggcatgttcaagaaatagaaataaggccagtgaggctgatgctctgagttactgaggataacagaagtatgatgcaactgctgaaatcaaattaatatttctttttccagaggaaaaggtggggggtgtttgattagaacttctcctggtataaggggagattctctcaaccttggacacctgaagttggcaggtgtgtaaagcattggttttgtattgcatggttggttcacgttatcaattactgtttaagtatttatttattcacttttcaaaaactgctaataattttctatattctaggcaccattatagggctaggcattggagaaattgagatgcataagacaaaatgcttatgtttaggagctcgtagtgtgcatttatggattggatagttggatagaactcttctaattattgactatgtgaccttgggaaagttattaaacctctctgtgtctgagtatctccatctctaaaatgagatatttattgcagttacttcatggagttgttgtgaggattaagtgagttaatacctttaaagcagcacctgagacgtaataaccactcagtaacttagctattattgttgtggtggttttacagaagcacaggaagagactcattaattcagtctcaaaggttagagagaatttaaaagaaaaggtgaagtttgagttcattcattaactcatcatttgtttgataaatatatatcaagtgcctactgtattccacatactacttttctgctacggcacatacttctttcttgctgcctggattatctttgacaccattattcagctgtcaaactttaacatccacatcatcctcttcaatgtaaccttcttcagtttaaggaagagtatatattagagataaaaattgtacaaataataatttagttacaattgtcaaccatgatatcaagtgtaatccagtcagtgagaggaaaaatgcaaggaacatctaaaaagtgtgaaagataaggaaatgtcttagctaagagatgcaatatatgagagataagaaatgcaaaatatcataagaaaaaataatcataatcatcaactttgtaggtttcccaaacttcttatagtttatgtatttatcttctaattttctaagagttgagcacttataaccaaaagggcttcaatgcttgcttttgagtcagccataagtggataaggagcaaaaggatgcagcttgctttcaacgccaagtcagacttgtgttggaggaggtgtttagggatgggttttctaagggagaagaatatgtagggcacctactgaaggagaagagtatgggctctttggccattcttgcagagaaaacaacagagtgtgggtgggataaggagcagaactaggctagaatagggagcattaggttggaacaggagggctggagggtagttctctggaattttgattgtgcctatataagcaattctttgcctttttttggatttacatacttgatgtcttctttcagactgttgaatattagagcaaacatttgagagcagagaatttattgtatttgtgtaaccagtatctctcattctgctgcatatatataaggcctttagtaaatgtttgctgaatttccctatcaatttatatatcaattaatgagataataaaatgagattggaagaagaggatcatatccagtagacctagcctataatttgttcaatattgatgtgtttaaaaattaaaaaagctacctagataaaaggccaaaatataacatgtagttatgacagtcagggtttatttagcatttctataagccagtagcctttcaatttattctgcatgtattcagtggtggtggtagacaactggttttgagtcaaaattgcatataggatcacattttcttgctaattcaactttcttagttctaggttggtaaatattgtagaaaaagcaaaatgtttcccacatgtctacagattttcttgctttaatagcttcatttgtgattttgggaaccagaatatttttaaataaaacaagtcatttattcctggaataagtccctatgccatgcatgtcttgagattagaaactcagctgagagcaactagtgattattccctgactacaactatttgtgagatacagaaatcttaatgatgataatccagtattagtgagatttttaaaaaatatatatatatatattcaagggtgctttccaagaacaatttatacctcaccaattatttactgagttgtatgtggaaattggaattaactggcaccatttatttcagttacattttgaaaccacttacagattgacacctgggtaactggctatattttatatagctctgcacggatcatagagttttagaggtagaagttagttttttcttttagtgttactcttgtaacaggatgtatttaactgtttcagcaaaaggaagacagacgtttccatctaaagagtatgtggttttaggccgggcacggtggctcacacctgtaatcccagcacttagggaggccaatgcgggcggatcacgaggtcaggaggtcgagaccatcttggctaacaccgtgaaaccccgtctctaccaaaaatacaaaaaattagccgggcatggtggtggcgggcgcctgtagtcccagctagtcgggaggctgaggtaggagaacggcgtgaacccaggaggcggagcttgcagtgagccgagatcgtgccactgcactccagcctgggcgacagggtgagactctgtctcacaaaaaataaacaaaataaaataaaaaaagagtatgtggttttgacttttataatacagtagattctgcttgaataaattttaagattaagtattttaatgtgctttgtgtagatacaacagaaatatcaaaggacaattccaatatgaggttaatattttaatatcttatatcaaaatatctgagcacctagaaactggcagtgacaattaacagcttaaatgattcttcaaataattcaatttaagggtaggatttggaaacaagtagcattatcagactgaaaataacaccattttataagaatgtctatggatacaatcttaagttagtggcgtatgccttttatatatttatccaaccattatcctctatgtgcaaagaatgtgatctaaagaatgtgttaaggcagataatacgtgtgtattataataattaaaaggttctgtgatacagactctgacctgaggataaagtactacaagatataataactaccataattttatattttataatgataaaactacctatagaatgaaataccttatatcttactttttgctgcttttgggttaattatgcacttaaataaatggatagagttcttacttaccgttttcacatttaaattcatcctgatatgatgacatatagttttaatgacctggttaatactgatgaaaactttcagtggcagtgcctggggccagtagtctgctgcatattttatttttatattattgcaataataacaaaagatattggtgcttcttttcacctacaaataatcaattaaggaactgaagcttaatttatttaaaaagcaatttttagaacaagtcgatagttcacatagagctatttaaatgtcccatgcaaattgatggaatgttctagcaaatattatttagaaaattattattattgttattctttttttttttttttttgagatggagtcttgctctgtcacccaggctggagtgcagtgatgtgatcttggtttgctgcagcctctgcctcccaggttcaagcaattcatctgcctctgcctcctgagtagctgggactacaggtgtgcattgaaatgcctggctcatttttgtatttttagcaaagacagggtttcaccatgttgggcaggatggtcttgatctcctgaccttgtgatccgcccccttgacctcccaaagtgctgggattacaggcatgagccaccgtgcccagactagaaaattatttttaatagctcacattctttgcccagtcatttcacaccggtattccataagagttcccttgcagccagaaacagaaaggattagattttaatatcatctaacaatattcttttgttgtttaatcacactttatagtgctaacccaaatctgatctggaaatctgttcagatccagtttgaggaactagttgagtagacaatactctcagagagctacaggaactaaatgtacatctcttgttcatttgtagacatcattcaagcctcaggcttggattcttcgtttaggtctgccagtcaacaagaattcactgggtggttactcatgacagagacctgtatgagactgtgtacatagaagtcaaagaaaaatagttactatcgacaagcatatattgatacatataggcacaatttttctttcaaaagtttgcattactgttgaggaaagtagacatctatatttttataatgcctatttgaaatttgtccaggaaattctgttgctggtcaacagtgtagctaggcctggtataagaacaggtcaggtacagtaggattctgattaaggcaggtgtctggcataaaaatagtgaacgttaggaaggtaggattcctggtatatagcattacttaaagaacactttgaactcttttttttttaatatactttaagctctacggtacatgtgcacaacgtgcaggtttgttacatatgtatacatgtgccatgttggtgtgctgcacccgataactcgtcatttatattaggtatatctcctaatgctatccctcctccctccccccaccccatggacaggccctggtgtgtgatgttccccaacctgtgtccaagtgttctcattgttcaattcccacctatgagtcagaacatgtggtgtttggttttctgtccttgtgatagtttgctgagaatgatggtttccagcttcatccatgtccctacaaaggagatgaactcatccttttttatggctgcatagtattccatggtgtatatgtgccacattttcttaatccagtctatcattgatggacatttgggttggttccaagtctttgctattgtgaatagtgccacaataaacataagtgtgcatgtgtctttatagcagcatgatttataatcctttgggtatatgcccagtaacgggatggctgggtcaaatggtatttctagttctagatccttgaggaatcgccatactgtcttccacaatggttgaactagtttacagtctcaccaacagtgtaaaagcgttcctactcctccacatcctctccagcacctgttgtttcctgactttttaatgattgccattctaactggtgtgagatggtatctcattgtggttttgatttgcatttctctgatggccagtgatgttgagcattttttcatgtgtctgttggctgcataaatgtcttcttttgagaattgtctgtttatatcctttgcccactttttgatggggttgtttgattttttcttgtaaatttgtttaagttcattgtagattctggatattagccctttgtcagatgagtagattgcaaaaactttctcccattcaataagttgcctgttcactctgatggtagtttctttggctgtgcagatgctctttagtttaattagatcccgtttgtcaattttggcttttgttgccattgcttttggtgttttagtcatgaagtccttgcccatgcctatgtcctgaatggtattgcctaggttttcttctaggatttttatggctttaggtctaacattcaagtctttaatccatcttgaattaatttttgtataagatataaggaagggatccagtttcagctttctatatatcgctaggcagttttcccagcaccatttattaaatagggaatcctttccccatttcttgtttttgtcaggtttgtcaaagatcagatggttgtagaggtattatttctgagggctctgttctgttccattgatctatatctctgttttggtaccagtaccatgctattttggttattgtagccttgtagtatagtttgaagtcaggtagcgtgatgcctccagctttgttcttttggcttaggattgtcttggcaatgcgggctcttttttggttccatatgaactttaaagtagttttttccaattctgtgaagaaagtcattggtagcttgatggggatggcattgaatctataaattaccttgggcaatatggctattttcacagtattgatacttcctatccatgagcatggaatgtttttccatttgtttctgtcctcttttattttgttgagcagtggttagtagttctccttgaagaggtccttcacatcccttgtaagttgtattcctagatattttattgtctttgaagcaattgtgagtgggagttcactcgtgatttggctctctgtctgttattggtgtataggaatgcttgtgatttttgcacattgattttgtatcatgagactttgctgaagttgcttatcagcttaaggagattttgggctgagacgatggggttttctaaatatacaatcatgtcatctgcaaacagggacaatttgacttcctcttttcctaattgaataccctgtatttctttctcttgcctgattgccctggccagaacttccaacactgttgaataggagtggtgagagagggcatccctgtcttgtgccagtttttaaagggaatgcttccagtttgtgcccattcagcatgatattggctgtgggtttgtcataaatggcttttattattttgagatatatgccatcagtacctaatttatttggagtttttagcttgtagggctgttgaattttgttgaaggccctttctgcatctattgtgataatcatgtggtttttgtctttgattctatttatatgctggattacgtttattgatttgcatatgctgaactagccttgcatcccagggatgaaaccaacttgattttggtggataagctttttgatgtgctgctggattcggtttgccagtattttattgaggatttttgcatcgatgttcatcagggatattgatctaaaattctcttttttttgttgtgtctctgccaggctttggtatcaggatgatgctggcctcataaaatgaattagggaggattccctctttttctattgattggaataatttcagaaggaatggtaccagttcctctttgtacctctggtggatttcggctgtgaatctgtctggtcctggactttttttcttggtaggctattaattattgcctcaatttcagaacctgttattggtctattcagggattcaacttcttcctggtttagtcttggactcttaccattgattgtgtggggattgtaaatggtgacaatctgttggtaccttggagagctcccaatagcctctatctttgatttgttaaggtgctactgaggctttttgttgtcttagctttaggcatactttataagctctgtcatcctggtggatctaaaaggtagttaatgcagctgtacttcaatttgctgtgttaggctgtgtggtactcggacattatctacattctgttaaaaccttttggccttcacaccagatcttaggcaatatttttgggttcctcaaagtttcctatgcactaaggaggatagataggcttatcagttcacaatgttggcacactttgtctccaggggaaagagcattttttggcacagacaaaagaagtattgccaagaacaaggtagcatatgctcagatccaattagtggcagagacaataaacacagtaagagttcagagaaggaagttgtttctgagggctatggaacaagtgaaaagctccatgcaatagcaggccctatagtaatgaaagcattcaggtggaagagggaattccaggtgaaggaaatggttaacaacattctattgatttcaattgaagaaaattacaaggcaaaatttttatttttaattagcctataatccacctgagggagaaaagaaccatgaaagcagaaaccaacattagatcaactaccatttatgtagtaaaaagagtaataagatatagtgtaaacttaataataatgtttaggagataaagccttaggaataaaggatctgtgttgggtagggttatttagggcactcttgatttcagttattattttgtttcttatattagtacttcattactatatgtgtctcaagtggagagttgaactcaggaaaacagcctcagaaagaaaaagaaaaaaaatactacatactgatctcagttatacatattttgataattaataatgtgaattgtttcaggcggtttattttttaccttttgtgctgcctacccactacttttcatattccagccagcctcttgactttggtgttctccattctgagagactgtccatacaagtatcctccattaatgtgaagtagagttgcttatacttacaaaaagtcctagaggatagaaaaacaatcaataatgggtgcaaataatagataaacactatttttgatagtattcagtaggtctcttaccaagttattttcagaatatctctaaaaaatattaatctagcatcactataccttagagttggaagtgcttcagagatcatctcatttaccccttactcaatcagatagccatccaacttgcatcacttctgtgattactaggttctgtctgaacattttcagatatggaaagcttgctacccccaaggaagccattctgctgttgaccaacacttagaaaggtattgcattaaactagaatttgtccctatgactttaaatagatttttccagtttctttccaaagaagctacaccaactgtgtcaattcatacgtttattcaacaaaatgtacaggtcatataatatatgcaaggaattttctgagccctacaaatgataacttgataaacatggatataatactgtcttctatgagaaggcagattcttaatacatttttttggatcagtaaatagatggatagatgaatctttttcaccattaaataatggtaaactcttgatatataggtaaagttggtgtattccttggtaagtgaaggatgtggaatgagcattttaatatcctaatatcctctagaatggtgatgtattttatttcatagcctatcagtgtaaaaaagaggcaaatacaatatttatatatttattttcaaattataaatatgaattacttaactaaagtattatgtatatgaactaaatagatgtttttaaagatttaacataagtatatatagctatatattttaatagtttatacagtgccctatataacccacaagtatgatttatagctttgttaattatttaaatatactgcctttctagaaaaccagcattttagttgtccattacatcttagttgttttcctaactggagtcaagtgatcacaatatggtagcatttaagatttggcttaagaacatattagaactcaccaagtttttcaaaaaataggctttgagacaatattaagaaacagagtacttcaaggaaagaagtgatagaagtaatttatgaaaaacaatttatatgaaagctttgtactttcaatataaaagtactatagaagtaaaacactataaagatggataaaaaggagaagtttgaaactgtcaagtaagctaaattccttatctctttacaagcctaataacccagttggaataactcatagagtataaatctgggatctcattaaaaataaatattttccagtaacacaatgatgcagaggcaaaatgtatgaaatagaaaataaaagaaagaaaataatgacttcatactcttcttacctattgtctgctatgccagtttggattaccacaccacaggtttagcttgagactgaactcataatttcttcccagactaatgtttccatgtgagtttcctaattctgtgtatggtgtcaccattctctgggtgtcccaggcccccaactttaaacttaacccctgttccccatttcatgactaattgtttaccaagttattttgattctctgcaatatccagcaagcaaattatcccatgtacttaggtacagtaaaaatttaggactgctaacaaccacaaaggtttgtgctttaagtttagttgtgagctctgaaaaatgttagagtattaagtgtcaaacttaagatggcaagtccattttcataatttagtttttagtttcaattttgaagaatctcatcaaatgtatatgtctcagaatacaaacctttaataatataattatttttctggtcagttacatgttttattgttttcttgatccttagacttacaacttcaaataaaaatgtaaatatctgcaacatttgggcaatattgctttataaatgaaactgtacatacaagttcagtttttcacttttacaaacctaggaaatgcccttgaagcatgaatgacagtgtttcctcaagaggttcacatcctattacagtagaaggcatggtcaggactcatgcctacactttcagctttgacccaccctggctttggatcttgggtaaatggttagtctcactcagaataaaacttatactagacttttcatgtcaatggtccctttctatgtctagctaacattgtgcctcatgtcctctattatccccatctggccctaattaggtgaggctgtatcatggcagcatagcttcgggattaagctctcaggcttgaagtcagattctttgggtatatgtccctgttctgctacctatggtaacaggacagaagcatttaatctctatgttttgttgtctgatttgtaaaatgaggtaataataacacttaatttatgggtttgttgtgagaataccacaggttaatatataaaagttctgaggactagcacataataactactatgtggttgctattattgatattcatataaagcactcagcaatgtgcctggtatatagtgtgtgctcactaaatattaactgttattctcattgccagactccacttcaatttctgtaagctttatttcagactttggtcacaaaacaaaatagatgaaagtatatcctcataacacaaatgcgtgttcttcacctcaacaaaccaaccaattatggcgtcctgagggagggtgtgtgcgtcaccttgcaatgttgtaacatatgcctgcaaaggactattctacaatacatggctcagtaaacttacgtttttcttaacagctgcaaactaagatttgttttgaataatcctattagtttgtgccagtgttactgtgaaagtgcatattcaaattcttggcctttgttttacctgttagctttaatgtattttactttttaatattataatctactaaaatctaaaaatatgtgtattaatctgtttcatgctgctgataaagacatatctgagactgggaaggagaagaggtttaactggacttaccacatggctgcagaggcctcagaatcatggctggaggaaaaaggcacttcttacatggcagcaacaagagaaaaatgaggaagaagcaaaagcagaaacccccgataaacccatcagattttgtgaaacttattccctatcacaagagtagcacgggaaagactggcccccatgagtcaattacctccccctgggtccctcccacaacatgtggaaattctgggacatacaattcaaattgagatttggattcagacacagccaaaccatatcattctgtgcctggccccaccaaatctcatgtcctcacatttcaaaaccaaacatgccttcccaacaatcccctgaagtcttaactcgtgacagcattaacccaaaaatccacagtccaaagtctcacctgagacaaggcaagtcccttccacctatgagcctgtaaaatcaaaagcaagctagttacttcctagatacaatggaggtacaggcattgggtaaatatagccattccaaatgggagagattggccaaaacaaaggggttatggggcccatgcaagtccaaaatccaacggggcagtcaaattttaaagctccaaaacgatccctgactttatgtctcacatccaggtcacactgatgcaaggggtgggttcccatggtcttgggcagcttcacccctgtgactttgcagggtacagccctccctcctggctgctttcacaggtgggtgttgagtatctgcgacttttccaggcacatggtgcaagctatcggtggatctaccattctagtgtctggaggatggtggccctcttctcacagctccactagacagtgccccagtagggactctgtgtgggggctccaaccccacatttcccttctgcattgccctagcagaggttctccatgagggtgccgcctctgcagcaaacttttgcctgggcatgcgtgcattttcatacatcttctgaaatctaggcggaggttcacaaacctcagttcttgaattctgtgcatctctgggctcaacatcaagtggaagttgccaaagcttggggattccaccctctgaagccacagcctgagctgtttgttggctcctttcagccaaggctggagtggctgggacacagggcaccaagtacctaggctacacacagcatagggaacctgggcctagtccacaaaaccaccttttcttcctaagcctcaaggcctgtgatgggaggggctgctgtgaaggtctctgatgtggcctggagacattttctccatggttttggggattaacattagactccttgctacttatgcaaatttctgcagccagcttgaatttctccccagaaaatgggtttttcttttctattgcatagtcaggctgcaaattttccaaacttttatgctctgcttcccttataaaattgaatgcctttaacaacaccaaagtcacctcttgaacagtttgctgccttagaaatttcttccatcagataccctaaatcatcctttttaggttcaaagttccacaaatctctaggggaggggcaaaatgccaccagtctttttgttaaaacataacaagagtcacctttgctccagttcccaacaagttcctcatctccatctgagaccacctcagcctgaattttattgtccatattgctatcagcattttgggcaaagccattcaagaagtctctaggaagttccaaattttcccacattttcctgtcttcttctgagcctttcaaactgttccaacctctgcctgttacccagttccaaagtcacttccacattttcagatatcttttcagcaacgccccactctactggtaccaatttactgtattagtcctttttcacactgcttataaagacataaccaagactgggaaggaaaaaaagtttatttagacttacagttccacatggctgcagaggcctcagaatcatggtgggaggtgaaaggcacttcttacatagtggtggcaagagaaaaataaggaagaagcaaaagcagaaacccttaataaacccatcagatttcgtgagacatattcactatcacgagggtagcatgggtaagaccggctcctgtgattcaattacctctccctgagtccctcccacaacacatggaaattctaggagatacaattcaagctgagatttgggtggggacacagccaaaccatatctgtatgtgattagataggaagcttgctctaagttggtagaatgtaatttaatgcaagagagtttgagttgaaacagtttgagataaatatgatttatattacaaatattttacagcaaactttttcaatttgtcattattgaaaatgtttcagataaaaatgaaagatgaagagtctattgactcttttttcttaagctaaaatagacaataccaatattaatttatatatagtatgtatgaatgttacttttgctttttgatatgaaatataagtcatatgttactataataataagcactactgacaaagtttcttcttaattgtaatctttacagcataatgaattcatcttcctacatctagacatgcaataatgaaatattttaaatactgaatttaggatgaatttgattttatatatgcttaaatttgaaataaccactttcaaatttctcacccagtgattataacaataaatgatctttgctagatatacaaaggtactttcaagcaatattccttttgttgcttaccacaattatgaagtctaatttcagaaatctcagattaagtgggatagtcaagcatagtgacagaattggtatttaaacctggactgcttcaatgcctaatctgttgagggtttttttttttttttatcatgaagggatgttggattttattgaaggctttttctgcatctattgggatgaccatatggtttttggttttgattctgtttatggggtgaatcacatttatttatttgcatatgttgaaccaaccttgcattccaggaataaagcctacttgattgtggtgaataaaccttttgatgtgctgctggacctggttttctagtattctgttgaggatttttgcatctatgttcatcagggatattgacctgaagttcccttttttcagtgtgtctttgccagattttggtatcaggaagatgctggatttgtaggatgagttagggagaagcccctcctccttgactttttgaaagggctttggtaggattaatatcagttctccttgcatgtctggtagaatttggctgtgaagccatctgttctggggcttcttttggttggtagtttttgtagttttttaaattactgattcaatttgtgaactttttattgttctgttcaggtttttgctttcttccttattcaatctactatttgactcagcaatccactactgggtatatacccaaagaaaaataattatatcaaaagacatatacacccatatgttcatcgcagtgctattcacaatagcaaagacatggaatcaacctaggagcccatcagcagaggataggataaagaaaagtggtacatatacaacatggaatacgatgcagccttaaacaagaatgaaatcatgtcctctgcagccaacatggattcagctggagaccattatcataagtgacctaatgcaagaacagaaaaccaaaaactgcatgttctcacttataagtgggggctaagcatttaatactcatgaaagtaaatacaggaatgatagaccctggggaccactagaagagggagggagggaagagggcatgagctgaagaaccatctgttggatattatgctttctgcctgggtgacagggtcattgggaccacaagcctcaaccacaggcaatttacccatgtagcaaacctgcatgtatatcctttaatccataataaaagttgaaattaataaaaataaaataaattgtacaaaaaaacccttggacttctaatgccaaagactacatttccaggtatttaaagtaaatagactaaaataattgattagagaattttaggtgagaggaaaacaccctttctctgtggattaataaaaacccaattaatattctttctttttattctcacctctcattcctttatagagaagagcaatggaaagaagaagggagcagggaaacatggtcaaggaaggaaagtgattctcaatcaggagaaaaggtagctctcactggtgaaaatttggtgcagtacaaccaaaatacaaaatccagtttacaaaaaatgaaatatttcagtgacccatatatttatttttctgtgtttttctgcatgggtttgggttttttccctattatttcagaattgggctgtagcctgcaagtaaattaaagaacacttgttttcatttttaattattgatcagctgtctctaaggttcatttactattaatgcagaggtagaattgtgttttttccatactctttagttcttgatgaaccccatatggttctggtgctcacagctcttcaataattcaagattatcatggaaaaataatcaagttttgaaaatctagatcagtggttttcaaagttttttctcctgtcaacaatagaaatattttttttctagttaaattatgatctggactcaaacttttaaactgtgtttaagtggagctgcttggcttttgtataagaaggaaggtttctccatgactcaattaactttccatcctctccggtgaccccagaggtagctctttcaaaggttggggctcctgttgaacagaatttgaagtacactgagatagatgaaaagcagttaggatgtagctcaggctgagttctgagatagagctgatctgggttcaaaccatgaacctcaccatcaactaggcttgttaccaacagcaggtagctgaacttctctaatatcagtttcctcctcagtataagtggggagaaaataatgcccacctcataaaactgttttgaggattgaaataatgcataagaagtatttggcatgtattgttacttgtgtcagttaataatctcttctgagacatattctatagtgatacaatgttggcagtatgatgaagccatagagataatgctactcagagtacagactgctttcttgatgacagacctgaatatttcaaattataatcctaggaggctatagtttatgcttttttccaactctaagatttgtataaagacacatataaagtgtatccattttgaataatacatttaaagggatactttatcccctaagatgctgcactggtgaaaatccctaggataatgtgtaatcttctttgacagtatgtgcacgtaaaatagtttcacaagtgcaagatggcaaatgtaatcttcccatgtgcaaatagactttattccattgagggtagagtctctacagctgagttttttaatgccatggtatcatttatctaattttttttttttttttttttgagaaggagtctcgctctgtcagccaggctggagtgcagtggcgcgatctcagctcactgcaagctccgcctcccaggttcaagccattctcctgcctcagcctcttgagcagctggactacaggcgcctgccaccacgcccggctaattttttgtatttttagtggagacggggtttcaccgtgtcagccaggatggtctcgatcttctgaccttgtgatccacccgcctcagcctcccaaagtgctgggattacaggcgtgagccaccacgcccggcctcatttatctaattcttaataagcaatccattttgctttgtttcttctctccctcgcttccttctcttcttccttgcttctatttggtgccaaacaccgcgttttatttatgatattaaaaagtaaagtgagtgtgatggtggctggtcacccattgttttgaattaataacagaaaaaaagaaatattttagtggcccatatgtttatttttatgtgtttatgtatgtggttttggggttttttagtgccttctatccctagaagtcactttaatctcaagactgtccaaataaacttttcagcaaaagcatcaggtgagaagtctgggagaaaccatcctataaaacaatatgaacagaatggagcagtgaacacaatgctcccattctttctctgtcctccaagccatctttcttcttatagactccctgccatgtgttgcctggctcaggttctacatgttcatcctgccatattggcactggcttctttgaattctgctctagttctgagacggtggcgctttattcactactaactcccaggaccagtgcatgctattcttcaatttattgtgtagattaaaaggtatcttcttaaaaaatgatgcatgctgctgggaaatacagacactttaattttacttagaatcttacttggaatgtgttagtagccagataaacaagcaagactgactcaggaaagaagccagagaaagggtaagtgtgtcaagcaaaagtagacagcagcaccaaattgaaaaaaaaaaaaatgagaggaggagaagaggctaaaggtacatctccttttacttttctttctttctttctttcttttttgtaattttgctttaagctttccattcaaattatcttatgcttcttggactagctattaatattagacttatggttgattagcatttcaaagagatagaggcaatgtatgatgattctgagtcacctactccattgaatgacagcttgactaacccagtgacacatacaggtctcagccacacccctatcctgaacgtgtcttctcagaattctctcccttaatcttgatctttgtgttcttctttgactttccattttatgtctcttttgcctcttgtaatgaattctctgttttcctaatcttcctccttacctctttcaaagtctgtgtatttctttctccctctttgtgagtgagctttctctctctctttttctctaatattttgcatacccttaattcttatctgtacaagccatggattttgaattatatatttgaaatattaactgcagctatttaataaagatttacaactctaggtttctgttaaataacaagtagttgaaagttaaaaatttcacattttacaggagaggttttttgctatgtaagccacttcttctttggactttaggtcagaatatttaagtagaaaaagaactatcagttctaatttaagctgttattttaatgttatagacagtaaatttaaattattcatggcattatggaatattcctgggtttcctgatcctctagttttaggctacagtgtttcatgaactggcttaactacaaaaaccattatctaaaatccataccaaacattaaaagggcagaaaaggggagaaggcatacagacattgaaaaattctgcacaaacttcagcctgtaagtgctttgaactcacacacaacctttaatgttttccttgcattctttgaatgaacctcacttttctgttcagaaccctagcatgtctaggaacttacattgcatgtgcttaatcatggaagtgaccatatgttctttttatttctaactttatttggctctgtctgccctgactttttcctctctggtcataaagtttttatcttaccattcagtttctcccagaaagcctctgaaccagtccaactttgttatttctgtctgctccccgagtccttgatggaagtgtgggtgaggatgggggactgtttaaacttttcccttttaggttaccatcttatctccttgctctcccagtatcaatattctctctgctagagagcagcttctcaacctacttgggtcccttagggatgtctctgcatactaatctttcagtacttatctgcaatccattacttaccctcattaaatacagtttggatcatttcccagagtcaatggcaaaaataaaaaggaatttttagtttaattaaagactggcaccattttttaattaattttttgacaaatagtaattgtgtatatttatggggtataatgtgatgttttgacacatgtttagattgtggaatgatcaaatcagagtgattagcatatccattacctcaaatatttgttatttctctgtggtgagaacacctaaactcctctcttttagctattctgaaatatctgctacattattattaactaaagtcatcttcctgtgcaatggaacaccagaacttattcctcctatctaactataactttgtacttattgaccaacatctcctcttttcctgttcacttcccaactcccagcctctggtaaccaccattctcctctctacttctatgagtttaacttttttagtttccacatataagtgagattatacagtgtttgtctctctgtgtgtggcttatttcacttaacataatgtcctccaggttcatccatgttgttgcaaatgacagaatttcctgtttttgtaaaggctgaaaagtattccattgtgtgtgtatatatatgtatatgtatatacacactttaaaattattcatcagtttatagacaaaagttatttccatatcttggctataatgaatattgctgcaatgaatatgggagtgtagacatctctttggcatactaattttaattcctttgtgtgtacacccagtagtggggattgctggataatagggtaattgtatttttacttttgtgaggaacttccatgctagtttccaaagtggctgtactaatttacagtagcatcaataatataaagtcttccccttttttccacatccttaacaacatttgttatctttcatcttgatagtagccaccgtaacagggtgaagtgatatgtcattgtggttttaatttgcattttactaatgactagagatgttaagcactgtgggcatttgtatgtcttcttttgagaaatgtttattcaaattccttgcccatttttaaagttatttttttccttgttattgagtagtttgagttccctgcatattttggatattagccccttatccagcatatgatttgcaaatattttctcctaatctgtgggttgtctctttactccctgaattgttttctttgctgtgcagagttttttggtttgatgcaatcccatttgtctatttttgcttttattgcctgtgcttttggggtcatatccaagaaatttctgcccagaccaatatgggtactctcccctaagtactttttagtagttttacagtttccagtcttatgtttaagtccttaatccattgtgagtttattcttgtattaggggtgagataagagtccattttggttcttctgtatgtggacttctgttttctcaacagcatttattgaagtgactgtctttttctcattgtgtgtccctagtgcccttgtcagaaatcaattgactattgatgtgtgggtttatttctgtgctctctgtcctataccattagttgaggtgtctgtttttacgccaatatcatgctgctttgctgttttgattactgtggctttgtatattattttgaaatcctgtagcatgacgactccaggtttgtcctttttggtcaacattgctttggctatttggagtcttttatgattccgtacaaattttataattgttttttctgggccaagtgtggtgtcttatgcctgtaatcccaacactttggggggccaacacaggcagatcatgaagtcaggagtttgagaccagcctgaccaacatggtgaaaccccgtctctactaaaaatacaaaaagttcgccgggtatggtggcgtgacctgtagtcccaactacttgggaggctgaggcaggagaatcacttgaacctgggaggtggaggttgcagtgagccaagatcacaccactgcactgggtgacagagtgagactctgcctcaaaaaaaaaaaaaaaaaagaaataattgttttttctatttctgtaaagaatgacattgggattttgataaggattgcattgaaactgtaggtcactttgggtaatatggaccttttaaaaatattaattcttccagtctataaacatgggatatcttttcatttgtcatcaatgttttatagttttcagtgtagagatctttcactttattggttaaatgtagtcctaaatattttgattttttgatgctattataaataggattgttttcttatttctttttcagacactttgctgttagtgtgtagacataccactgatttttgtaagttgatttatgtatcctgtaactttactgaatttgtttttcagttctagtagttttttttggtggagtcattacgattttctttatataaggtcatgttgtcagcaaatgaagatgattttacttcatcatttcctattttgatgccttttatttctttctcttatctaattgttctggctagtacttcgagtgctatgttgaaaagaagtgatgagagtgggcatccttgtctttttcctgatcttaaaggaaaagtcttcagctttttaccattaaatatgatgttaggtgtgaatattggcatcattttcaacaataaaaatgtttttaaaattttatgttgtggcaaaaattggctatgcaagatatttttatcattttataaaagattatggatcaaaaaatattaatgaaaataaaacaaaatatattaaagcttcctctattatctttattcaacttaggtttaaattgtatgataaattagaaatggaagatattaagaaaataaaaggctttatagaacttttgtagaaatttgaaagatttgcataatttgtatagagtaaaattggggacagttttccatgaggtcataagtacaggataggagggcattaaggtggtggaataaaattggtacatactggtatgggacataattacagcaaaatgtgtgcagggggtaggattcatttattcagtcagttggacagtcaattatatattttacaaattgtctagttagtgttattttgtgccagtcattatactaggttttgggatttcagtggtaaataaaaacagacaacatgaagtataactgtataagcattcattgagtaataacacaataatttaatgattatgtatgtgtttggcaggaagacaaccgaagccatagaaccacatagcagggggtcttgttatgcagagtgtagaatcagagatttccatgatgaaatgatattgaattaaatattaaagtgggagtgaagagaacatcctttctgttttattttgagattggcaaccctcggcattcttaaagttcaaggggaaggattcagtacctagggaatagtagaacatatggaggaaaaaaagatatctgcaagatatctgagatggtagaaataggaaatgaagttgtaggattttgtggtggggaagcgggtcacagtttagtgctttccttaagacaggaaaagatacttgtgattgttttgtaaataggctcttgaacagggaggaaactggtgaagctattgctttaagaatggtggcaatagattgttgagcgattggaatagcttaagagtgaaagaccaggtcaagtggaagatagctgcatctaagcagtcattgagtaataaggtcatgaatcgagatagcttaatgtccacgtgaaaattatcttctatgttttctgttttcgtgacatgttttcactcctattttttttaaaacaaaatgcagttgtgtgtatctcagaagtcctattcagtaaaaattttccctatactctcaggaagagttttattgcaactcccccagaatcccacagaatttgatttctacctcttagtgcacactctatgaaacaatgaattgtttatgttcttgttacctgaataaaactgataatttctcatgggcttggagagttgttatttattttttatagcatacacaaggcagaatttggaaaatattggacacacaatagataacaattagatattgttattgattgactgagtgcctagatgaagagaatcaacatttgcattttttatattttccacaggtagcctgtcttgttgcttttcttcttagtgtatctttaagtaaaagacttcataatttggaaaatgccaatacctttattgttgaaatcaattgcatgcctaaagcagacagattaactgcttttcaagacatagagaattcatggtaactggtttatctaacagtattattattcagtttcagaataatacataccaaaatatgttgtgttttcccattcttagtggctgttctaacaggttcaccaacaacgttgtttacttctctctttctctctcttactttctctcatgtctctatatatctataatctttctatctatccactgatctataatcccatgtatatacatatatgtaccctgaagcgagataaacatggatttaaatcgtgttgccttaatttaactatgactcagaaatgtcatacagtcactgagcctcagtttctgcatctgaaaatggtaaataatttctcttatcttgcagactttaagacaggattagaaataacatcttgtgaagtatttaataattggtagacaattcacagtggctattattttggtgtatactttatggtactcattgttatgtagttgtatataggcataaatggttaatgctattcataactgacaatgtattctgatcctttttggtggacaactgagagaaaagtctgtggtttcagattctgcccctttaggaatggataattgagaggaaggagccgggattcttcattcctctccctccattagcatccaaactggaaccttcatgatggaggataggatggattctcctgttagagaagatagttgcaccatctgaacactggttactcaggattctatgtttatcttttaactttttcaatgaggacgactattgtattggcagaaagagtgctttttgatatggtttatgtatatgcccaactcctaatgcacaaacctgttagtagagcacattcaggatactcaagccctgactactgttgaataaagaaacaataaccctattttatttagaggaaccacctcaaagtctcttgcagtaatgctcaattctcttcccttcctaactcaccaggaagaagggggctggaggcacaaatacatgtttcttcccactcccaaagagaaaggctgtgcagtgggagtaggctagatgttacaattctttgctccattaggggattaaaatgacaggtgacacttctcttttataagctaggcacctaggaaaaaaaggttgcttgttttgggtttgctttataataagaagaatatgctgaagcacagggtgctagaaaataaaagatgggtaagaggtttgatgaaagactgggaataaaagtagttgcatttctagaacagcatgaaaatgtaatcctacaatgtttgagattgccatggatgaagttttaaagaagtgactttgctcaggaaattaagtttttgatcaaggagagtaaaggttaagaaagtatttgcaatttggtatcaggtttagagaagacttcaagtgttatagtatagaggccatttggaaagtcaacccttagcctaaagtatggagaaaggggagggagaggagggcttttaaaaggaagtaggaaagacaaaatcgtatcttgctcatttgataattttgcctaaaatctgatgggactgatcttagcttagtggccccatctttttaaaaacgtttcagcccatcttttctggaattggtaagattggaagtggatagcagctgggcgtgtcttcaaatgatttgttgttgaacagaataattccttttctagaactaacccatactaaggtgttgtatagaggtggagtagggtggtgatagctagttatttattgggcaaacatgctaagcaaagtagcttagaaagtataatggcacaaagataaactgttggcttacttcctgcttagtgaaatattgtttattaagactcaattcatagttggcttctattgattttttaccatccagtactcaaagatgtgcaaaaatgttccagcatttgctcaataatcaaatgatcactttctttgtattgacaatctctcttgatgttagtttgttccacatgtcatccaaggctgacaatcgttatagtagcctcaagtttttcgtcattacaacttcttgacctctctccttctttctctttctccaacttaagacccaggtatatagaaccatttgcaacttctacaacatactgtcattgcttatactttacccagtggttggaacattctaacttacttcttcacttgcctcactctactgaattctcaagacggggctcaatgtcctataggaagcatggccagttgcaggatgaagtcaaagatagctgtctctgctacgtgctccagttagatttctgtgctttgtaacagcattaatcacaacatatagcatgtcattttcctgctcctctctttctgggtcatgaataacttgaggaggaagaatctattttacttttgctttgaaatacacacacacacacacacacacacacacatacacacacacacacacacagaatacctaatgtatgattcaacataatgtctggcttagtaggtcatcagtaggttcaaagaataaatgaatatatgaattgcaagtgctttgcataatggatatgtaataagtaactgttaaataaatgttttcaaaggagttactcttcttgaagaaagcaaacttcttgattctatttttattacaaaagtttaaagatatatttaatgagacattttcaaaggaaatgccataaatggaggtcattaatcattcactaattccttttcaaccaacttcaggtgattgtttcccccaaatcaaataaatgttaaaattatttgtatagctgttaaagtgattgatataacttacatttaaatggaagaaaagtgttttgatagtaacattttcagccccaagatagcatgttttcctcatgtgttttccaaagaaaggaagctagattactatgacttaatttataatatatttcaacattgatggatgaaaaaataatgaagtgtttatttacctgaagaaagtaaattcaaggtccaatatatcttaatatactgatttattgcttatgtaatgtataatattaattatgtacaactgcattatacaacatacataatggcagtaattatgttcgtgtgtctgaaatacatttttgaatgaggtatttatttattgaattcaaagggcagaacaataagttaaaagaaagtataaggcatggccagagctcggtccagtttccagcatacaacaagctctccataaagcataatttctcttttaaggatattgtccttaaggcagtgtgctgtggtagtgttgagtcaagcagtctggacttaataagacgtttccctggcattcaaaagtttttgatctgttaaaggtagaaaaatttttattaaaaagactattttgtattagccaaaaggggatataatcgttgttaatgtaaaaatagatatgatgtattacttaaaaatttttgactctctaatatctttcaaatttccaacaccaacagtaatataagtccagtaagccatgaatcaaattggaactgtacttcagcaatggtgtagttctttgcagtgcagtctattatgttaagtagtttcttaccgtatgaaattcatgtgttcttttcataaacctaggattataaaaagtctaatgtgatgtgtgagtttaaggctatgaatccagctttagggaggtctcattaaggaaaaaggggacagatggatccatgtgcctactgtgtgttatagtgcctactgagtgcttttggaataaaaagatgagtaagtttgagccttttaacaatagctacttcccttagaaggaggaaaggaaattacagaatacctctttgaatttttgaccagttataaattttttttaaaagtgaaataaagaagttaactaattggatttgcttcactatttcagtcaatctgtgttgaatctttgagcaaaactggttgagcagcttacatgacagctctccaagtaaatggaaaatttcccaagctcatgctggttaggaaacagaagtcctcttttaaagcagtgcagaactcagcagtttgggtttcattgaactggcttagtggtttcaacttatataacttccatatggaaagttaaggggaacatagaaaccaaaccctcttattgtaccacctgagagcagctgctctttcgggggtttctggtacattgcctaggaccctggagatcttttatttttcctaaaaatctggaattctgtccaaagaccaacgaaaccatgaaagtcaaacttatgcaaactaatttctaatggcagtgagaggaggaaatccagtttaatctcctttttaaagtgcacaaacacttggaactgtttgacctaacagtcagcaaagggtccagagagaaccaacacaaaacaggcaacaggattgtgttctctagtaaatcatggatggtgaaaaaattttgtttttcttttgaaatagtctagaggcaaatgagaatattaggctgaacactgtaaattacagacaactaggaaccatgattggtaaggactaaagatgcaattttgaaactaaaacaaacaaaaaatttatgtctcacttggttatgggaggacattgagaatcaatgaaggtctgtcaagtattatactaaatgtattatactaaatgtattatatgtgctttgtcatctaattttttatcacttctgtgggtaggaattatttcaacctaatttttgcttctgaagaaactgacagagagacggaatgtgtttctaaaggactgaaaaggggtgaatttaggatcgaatcctaggtgtgtttctacctgttttaaacatactgctttctattttgaggtgtttataatatttcttttaggtatatgaatttacaaatgccaagagtgggttgaaccattcttaaaatattgatagtttcataaaaaatattgtaaaaatctttacatgcctaaaattgattacttctctgagaaagtttctacatgattgaatttgtgtggccgaatgaaaagacatatgttttagaagagaaaagtaatgaatgattgatgattgtgcagtgtttctatccagtgatttagaactcagcttgtttgaattgctttagcagagggatcacaagcgatatatattttttaagtaaatgtttaaaacattggctatatctttaattagagaaaaatttctggactcacgacgagcacagaaatttgagaaaattagtgtaattaaaactcagatgtccagcaagtttgtattatatttcttttgtgcttcataagatgtgaataatattttccaaataattaagactgaatgttaactctgtgagaaaaagaatttatttttagaaatttgaataagaatctccctttaaaatccacatttccatgccatatgtgatcattttatgagtaaaattttacctttcctagaatccaagatcattattataaacatcagctactgagttactctgttaactgccattgatacaatttttacaaaatataaacttgagtaacaactggtcctagatttaacaaacagaaacaaaaattacccatttattgtaataatgacatatttttaaatcttctataactggaataaaataaccagccactatatgtatctgatcctctgcattctcattccaactgcatgatgaaggtcaaactcctgctcaatgcatgatctttgtcacgaggtggagcttaccaggacttatgactgtttacaaactgacctttttctcctttgacccctatctttttcttagtatatgtgctgctgaagtaagcattctcctttgactctttcccttcattttattattatttttttcaatttttcttttcaattttttgtgggtactcccttcattttagaatctcaaagtagcacttagtcaccaaatgtctgtttcttctgttttgaagtctaatctaactcctctggctcccctgagctaatgctgattcccaaagagaaggcacccttaactcaaagttagaaatataatcaaagtccctaagtttcctcaaatatctctttctagcatgtctttctgaactgagtcttatcagaaatttctcctgcaaaaatactttcctggcttgtacttcctaattttattcaagaatgtagcaggaaattcatgaagcattgatgaagtgtctattatatggaagatactcaggttcttcaccacaaagatggctaagacgcatgctcatcccccaagatgcccatgttaaagtggggggcagggacataaagatgtaatatatatatagatgattgtgaaatgatatagacgagattcaatcaaagaaaagatgttcttgaaaagcaaatctcccaccatgattaagagtctgactaagaatatgggaatgaacgtgataggcagtgggctgagagatgtgcaaataaatgctgtgttctaggaaccatgtatagttaaataaggctgagcatagacatgagagagatggggagtggaaggagggcaggctgtaagggtgagaaccataccacaaatgagaccatgctagggaatcagacttgattttacacatgatgggctgcttttggagtgtgtttattttagatgaattattctgtagcaacagtgcagaagagatatttgaaaggggcaacagtggaggcaggaaaaccagttaggaagtgattgttgtcatctgagctggataggatgaagctttagattgggtccatagcgatagagatggaggagagaaaatttagagaaatatttattaaatgtacgtgatatggagagttctaaatgtttaccttgagcagcaggaacagatgcagattttgtggggcctgaaaataaagtaaaattattaattcaaaagcaggtatgaaagtaaatatttatttaaaatgagagaataaatcacaaggttacacactttaataaaatgacaagccacaaacctcacaaaattgagaaaaagaaatgtattttatataagcacaaactcagtatttcttcagttcaactttcctttagccatattccaaaactatctgtactcattctaatatctcccaacgtgaagaaatatgatagagatgaaatcagaattcaaagagaatcaggagtgagcaagatacatcccagaacctttgttcctggtggtaaattaagcaatcatgtctggcgaaagtcagcacttgttatttcttatctgcgtaaaatattttccattttaaaccaagaagactctgaattatcgggaattacatgtttttggccataagagtggaataatgactgtaatcattaacagtaaggagtgagggaggctactcaatgaggaaagaaatgtgtaacattgcttcacttaggaatattatccccctctgctattcactcttttagtgccttcctgaatagaatatcctccaatattcagatacaatgggctctagcatactctttaagaaccaaaatcttgaaatctataatgaatcaatgcagataaacttttctgaactttaattagatttttatctatttgatgtctatgcacagaaacaagatagcaaaactaagaataaataggattttataaattgttttatttaaagaatagcaaatattaactttagagtattaattcctgtgatttccttgatattttttaagacaatcagtgattcctatgagaaatgtggcaagactggtgaaacatgccatcttttaagctttctgttcttcctttgagagacagcccagcatagggattaatgcaggaaccatggagtttgactgatttagttggactccaggctgcttactggttatattctacttaacctttatttgcctcagtttcttcatctgttaaatagggataaaatgacacctaccttactgggttattgagtggattataggtgttaatatatgaaaatatcttagaagcaatgcctggcttctaaggtggctgttattgttgttatccaaagagaaggaaacataattttccttagactagcctagaagtccctgtacaactgagtcagtcagatctccagactttattcctagctactataccaggtatgctgagctccagcccagtgttgctcagtgtgttccatatggatgttctgagataatttgttatgcccagtaagtgtagagctgaattaaatattttagaggtggcagaaagttccatatagtttttcatgctttagactcataactccaaggctatatggatggtctctgaagatgatggggcaatatcctttctatctgttaccgtgagctttcactgaacatgaccataattgactgtgctaagactttggcctttcctacttttgtggtataagttcagaccctttgaagaagcagttcataaatgcaattaaataaatttcaccccaacattagctgtcctgtcctgacaagggaagtgttgcttgtttacttagcacttgtgtcttgttaatactggtgatggccatctgtgggtatgaagagctaatggctgttaagtgacagacgaatcatttccacagagcatgcatacacgttctttctttggatggcgtctacagtttgtccttggcagaccattgctattttcagacttgcttccagtatcctcttgtatgtgttgcctcacagtaacttgtcacttcacttaagcagaaagctcacggttctctcattgctgtacctcctgtactagcctctgaatgcaatgtttgggtgactgccattatcacttcctttggcttttgatcactaaacttccattatccaggcatcacttgtatttatgagtaaacttttccttttgcaccacccccatactccaagtcttatagatgagccatttcctgacagctaaggagcaatcaactccactgtcctcctacataataatgaataatcttttcttgcagtcaataaaacaggctcccacgatcatatccttttatgacttggggatgctggtgaaaaatcttgaccagatattatttgatttgggagaatagagcaatgtaaatatggcattcaatatgctttaaaataattatctggaaggtgtaactttcatgctaaacatgatttacactacaaagaaagtagtctaggagaaataaaccacggaacttgtgggcattttgtaattgtctaatctagctcctttattttatagttgtggatgctggggccaagtagagttgactttctcaagggcacatagtcaaggagcagtggagatgctggaatagagtcttctgattcacagcctattactcttcattctcggatgttttataactgataatatctttgaaaatatctaaatatttttgtttgggaggctacttgagatcacttccttttcactgataggtcagaggacacacaagaagtccactcttaacatatcagtaagtgagtgatggatgaagtgaagaggtaagtgtagacacctccatttttaagttacattgttggggagatgggaagaaatgcttaatgaattagctctccgtctttagtcaatctatctactatgatttatccagtaatgcattggcccccggaacttggtgcttttacatctagcacatctccatatcttatatttgagtaaacttttaaatatttattaattgttattctgagagtggaaatatcgtaagtgtagaataaggagattaggctctactctaaattctattgtgaacctgaatcctaatcatgacaaagtcactactctttgcctcagtttcttcacatgtaaaattgaggtgctgctttaaatagcatcatctaaaattcatttcagatattgtgaatggaaaagctacaatctctgaatgttacaactgtcaggtcagttaccctcatggatttcatacatttcccatgcctggttgttggcagagggaaaagagtgggagtgtggtgtctgtgttagtattgccagctgatgggctttaaaacaggagtagtatggtttgagtaacaaaaataccttcttaggatgcctcaccaaataatagagggtgctgaagagagtatctaagtaagagacctggctatttctggaggtttttcaactagacctacgtttaatatttaaaaacatgaaaactcatgtaattaacatgtaacttatttgtattaaaattagtatgctgacatgatattttctaaaactgggccacatatgcatggatttcctaaataatccttcaagagaatagagcaggaaatgaagtgatatgcccatttgcagtgtggtatggggcttcctgaatgtataaatgtggaaggcagcaaggtggggttggataccagtaatgccaagaacttaatttcagcatttcaaccaccgtgtacatcctcaaaatgcctttcactttaattttgtataaatacgaattggatcccgggttaccttttgctttagagatgaaaaaaatgtatttacgtttcccacacaactgctaggaattaaagtagtgtgaaaactccacacaaataaataatacatttaaaactatttttagaagaataattcaaaaagacagtagttttgggacataggcaacaaaaagtcccttttacctaggtttctttgattcagagattcagcatacggatttatggagacagattatatcctcaacaaattaaagaatacaggatatacactgttgtctaatataatatgaggaaactttaaaatttatttccatgaattctatgttcaattggaaatatatgttcaattgagtatcagtagaaaaatctattgtttttactaatgactcagctgcttaaatgatctattgtatcggtggccagtggcaggaaggaggctctgtgcagtattgttgtaaccatgacattagtgacatcatttagcagaaatagaatttgggacatttggaaaacaaagcagtggcctcttggctcaactttgtgagaacctaataaattctaagaaagtataatggacagtgttgatttctccatatatatttagtgattttacatgtatgcacacacacacacctacatacataaagtatttcatttaaatttacctactaatgtatgatattcgcaatgccgtatagactttgggaagaatgttaatcttgtattgcaaagccatgctctactttaaaagcaatgcctccagatgtacagcatacttaacagggccaagaaaacatgtaacgttgattctgttctgagatacacctttgttaaaaagaatcccttcagtttttcctgtctgactaaaaatgatgaaaggcagggtatcctgaatggctgtgttagaacatcgaggtattggagatccgtgaaggagcatcatcgttactatagaaacaaatgctgcccctgtcatggacatccaaaggacagactgaaaaatgaggaagggaaaagcaatgggaggaagaggtgccatgaaatgagaataaagaaactacacaggaaggactgaattaagaaaagaacagcctgaggcagagtgaggaatctagacacagaaaattcccaatggaaatgtaaaaaactggatcaccacttgtgtgggtacaaagaaatgatgacttttctgtttttaaaagttaaattttcttctaaagtataagtatgtttttgcctttggaacaactttttgtatcctgaagtctctcttatggcacatgtatacatatgtaacaaacctgcacgttgtgcacatgtaccctaaaacttaaagtataataataataaaattaaaaaaaattaaatttgaaagaaaacaaaataagtgaaagtattgaagattgtgatagaaaatgtgtttgaataatgagtattagaatctgtgacaagtcactcgacctcaccttaaaatagggaaactaatagcaacctcatgattattgggtcagtataggagagaaccaaattcaaaccctgctccatggagtgaacatttctattttgggggaaagattagggaacggaatctgggaatataaattattcattttagtatttcagaatgaagagaaaagagaagatttcttttcctttattcctctcgctgaaaaagaataatttgttcatgtttgaagactgtgaacagaggtagaaaacatttattatatatatgtaaatatataattagatgacagtttacaaagtgaatgaatagatgctattaaaatgctacttttgaccttcaaaaacatctcaaatagggttgatattatttggttatttgctgatttggataaattgccaagcagaattttatatcaagaatagaagatataacgtttttctataacatttgatatgttttctggaaatgtttacttatagattattatcactcatgtattgtggtagacaaggtgatgtagcatccagatacctcttaaaagaaacacttcccagctcctgcctttttatccaaagtcatactattcactccttagggcagcctactttcatagctgatgaaggttggggtataaaggtatggccatcttctgaggttctgttgggtttaccaaggtggtggggcctgcattgaagctcagcttttcttctgccagtcctgcttcttcctcatccctttcatgttgttgagtccaacaagacagttcttaataaacatcctgcatgctaaacttcaattcacagtctgatttctagagaatacaactggcatcatatactttactattacaagtaaaatatcatatggataaatattttctatttgaaatgtccgtaaagttttacttttaaaatcagttttcacatgtatgcatagcttcagattacctgtactatcctttaaaaattcacaaagaaagctaaaaatgcttgcaaaaattgttagctcatgttttatatgcagaatcttagtgactaaggaattttaagaaaatatttataatgatagggtttcaggagaccctagagatcgcatcaaacccacttgtacagataacaaagctggagcctagagggctaagaggactctttcaaggccatgccagggcttagaacacaagaagtcctactactgctttagctttctgtgttcagggaccgagtttttttttttttttgcctttcttctctcttttctttcctcttctgtttctttaacctaatttgcttcctcatgttcgtaagccacagctgtttcccagaactgtgaaatcctttccgagaaatgattaggagtgtgatgtgtgtagggtggtatagagagagcacctataactcctgtaattctgtcaacttgtaactgtgcttaaaatttatcaaattagagggtgttttctgagcctcatgacactagcggttttcccagatgaagtgaatgttacccaggtttcctctgagaatccagaaggcaggctgatgggcagcttcttcattttacattcgagactacacatttgtaccttcctcccatgagcacaaaaaaagtattcaatatttcttaggcattagatgtaataaagtgtcattaggagttttatagtgtagaaaaatgtattatttccgagcccattttagtctttctatgtgggagacagtgtatttactgctaaacatgttctacagtatatggcctgaatatattctgcagttatctcatatctaagcaggtatttaagtagttgagatccatttatctttcctgaaatgccttaataatattttataactcattagcgtgtacaaaatacttttacgtatgtgtattaaatgtttgttgaataaattatacatgttcttatattcagacattagaaaagaaagttatgtaataatctcacttaatttaagcctcaatctatgaagtaaatattatcttctccattttccaataagaaatctaagaatctgcaagtttaagttctgataaccactggcttacattttctgtttatcatgtcccagacatgttctaggagctttatgtgtattaactatttctttgaacaacccagctgaagttggtaccattattatcaatggcattttacagttgagtacaatgaaacacagagagatagagtaacctggccaaggtcacacagtgggtgaatgttaggaatgggggctgggcgcagtggcttactcctgtaatcccagcactttgggaggctgaggcgggcaggatcacctgaggttaggagtttgagatcagcctgaccaacatggtgaaaccccatctccactaaaatacaaaaaattggccgggggtggtggcgggtgcctgtaatcccagctacttgggaggctgaggcaggagaattgcttgaacccaggaggcagaagtaacagtgagctgagatcgtgccactgcactccagcctgggtgacaagaaagaaactccatctcaattaaaaataataataataataaaaggaatgggatgcagcctaagtaggatgaccaactatcctggtttgctcaagactgaggagtttcccaggacacaggattttcagtgctcacaccataacagtctcaggtaagtggaacagttggttggcctaaatccaggttgtgtgctcaaggacctacacttttaagcacctagctcttctgtttctcatgcagaaggcggtggatccagggtttgaaccctcattgagtgactctgaagcttgtgcttttatatttccatcatgttgccgtgatttgtattttaatacaaatatatcacaaaaagtgatcatagattactaacgtgtaatatgtttggataggtaatcatataccaaagccttatacatttagttagacaggaacatgcattcggatatttgtcatgattcttttgtaaacagctttattggggggataattgatagcaaaaaagcacatattttaggtatacaatttggacatatccatacacccatgtaacagtcactataaccaagttaaaaaacatatttatcagctccaaaagttttctcatgcccccaccttttagtaagttctagatatctgttcaacatagtgcctatatcttgtgctctttaaaagttgttaggagagtagatctcatgctttcattcctaattggcttcgtctcatttgacaattggctgtttaatttttcttacacttcagtttctcccaaaagcctattccctattttccataagttactacagacttgtagtacagattgatattttattcttccctttcccatagttcactcctgaatgatatctttctcatgtgtaccctacttcaacttcactttccctgatgggtctgaaatatatgatgtatacattcagtatccacagatacctgccagtttcctcttctgtcatggttcctccttatctataggcccttccttctcaaagtgttattgtttccctaatcccaactcctcacatctcttcagtttcatgacatcttcctataatattgtgccgataaaactgccttcagattggagagaagggagaaatcagtgtaaactagtgttgtcatggacacctttatagaggtgatattagtcaaactgcgttttaaagagtgcaaatgcgatttagatgagcatcagtaatatcaaagtcttgattttactgatttagatttgaaggaagattacatctaggaactaaggaatattaaattagtctttcttttttatttcatgaacttaatcatgagtgaactactagctgacttatgcaatttctagactctgtctttgaaggcagtgttcttaaattgtggaggcacatggtgcttaattgtattggaggttggctttgcattgtaaagagcatgtttgcgtaacgcttatcaggtgagttacttttgactggcatttatttaacttccttgagcctcgattatcttttggctagccaaacttaccatgtagagttgttgtaagaataaaaatagataaaggattaataaaatagctagtttagtgcctggcacatagtagctattattagtcttacctaaaaagttgttattctgttcatggatgaaagcaattgattttctacttctttcaatactctgatgagataacaagtacatgagaatggatgactgtggttagtattgtaggtcaggaataagaaattatttttaaactcatcccactctttccttctatagcaactccttctttgtctggattgagatttaagtagatgcttttctccagtgcttcagtactgaatgtttaagaatgccaggtattttaatttaaaagcatactttttcatcaaaaatgatgcattaaaaatattaatgttaacagtagataacattttgagatataaatatagcacactctgaaaaaatttttcatttaagcatgttgatatgttagatgttagattgaggtagacagagggtttgtgattacttgttttgtctacaaaaaggtagctatcagaaatgttcaatattgttcacattcatatttcaacagaactaccacttttggtaaataccaatatgtgtaatattttctggctacacttccctagaacaaaatttatatttttcccataattgatttaacttcattatttgaatatatcttatagtcaggtatgtaggtgatgcttactttatttatgctactaactttttttaaatttacttattgaacagtgcttttcaggctaatggggcctctggaggcaataagaaatagctgggaaaaatagatgaaatgtttcattttaatttcaattgttatttgcatgcaatttattttctttcagaccttttctctattacagaagttatgggggttggagggagagaaaggcaacgagagagagatgtgtgtaaaattgcctttcctggctgtggtcagaagggcatatgactgtggaagaatggtcagagacatgcaatgctaattgctttgaaggtggaggaaggtggccaggagccaaagaatgaaggcagcatctagacatggagaaagcaaggaaattttatatctatctatctatctatcatctatctatctatctatctatctatctatctatctatctatctatcatctatctatctatctatctatctatatccttacttgggaagaaactttgtggatgtgattaaagatatggagcttgagatgggttatatgattgtgatcagtctaatcacatgaatctttaaaagtggaagaccttttatgcctttcctggctgtggttaaagagaggtgactacagaagaatcatcagagagatacaatattgatggctttgatgatggaggaatgtgatcatgagtcaagaaatgcaggtcatgtttggaagctggaaaaggtaaggaagtagattctcccttagggtctccagaaaggaacatatccctgctgataccttgacttttacccagtgaaacctgtgtcatatttctgacctccataaatgtaagagaatacatttgtgttgtttaagtcactaactttgcagtaatttatgacagcagcaataaaaactaatacatgtgtacatttcagattgtattgaaggaaataaatatattttcgttgttttgaatgtatgtatattcatctctagcataatctgtagtaatataagcttaaattatcatcccctacccaagacaaatttatttataggagtccccagtttggtgcaccatgaacttgcatagagggaactctttccttatttcaaaggatatttactgagcacttagtatacaccaagtgctaagtgctggatatactgtaaataataatagacatgtttcccactcttactacattattgcaacattagtcattactagttctgccattttttctcatttttagattgtgctaaaaaggaggaaatactaaaagagtattgtactaaaagagtccttggataagggcctctttctttcttggtttgcagttagcactgttccaacagtatgaagacataaacaatttttaaagaatggaagcctttttgaggctaatacatattatattcgttcattttcatgctgctgataaagacatacatgagactgggcaattacaaaagaaagaggtttattggacttacagttccacatggctgggaggcttcacaatcactgggggaaggtgaaaggcaaggaggagcaagtcacgtcttacatggatggcagcaggcaaagagagaccttgtgcagggaaactcccatttttaaaaccatcagatcttgtgaaacttattaactgtcaccagaacagcaagggagagacctgctcccatgattcagttatttcccaccgggtccctcctacaacatgtgggaattatgggagctataagatgaaatttgggtggggacacaaaaccaaaccatatcattctgcccctggcccttcccaaatctcatgtcttcacatttcaaaatcaatcatcccttcccaacggtcccccaaagtcaacccatttcagcattaactcagaagtccacagttcacaaagtctcatctgagacaaggcaagttcctttcgcctataagcctgtaaaatcaaaagcaagctagttacttcctagatacaatgggggtacagctattgggaaaatacacccattcataatgggagaaattggccaaaacagaggggctacaggccccatgtaagtctgaaatccagcaggggagtcaaatcttaaagctcccaaatgatctcctttgacttcatgtctcacatccaggtcatgctgatggaagaggtgggttcccatggtattgggcagctccactcctctggctttgcagagcacagccttcctcccagctgctttcatgggttagcattgagtgtctgtggcttttccaggtgcatggtgcaagctgtcagtggttctaccactctgttgtctagaggacggtgtccctcttctcacagctccaataggcagtgccccagtagggactctgtgtgggggctctgactacacatttcccttctacactggcctagcagaggttctccatgagggccctgctcctgcagcaaacttttgcctgggcatgcaggcatttccatacatcctctgaagtctaagcagaggttcccaaacctcagttattgatgtctgtgcacctgcagacccaacaccatgtggaagctaccaaggcttaggacttgcaccctctgaagccatggcctgagctgtaccttggccccttttagtcatggctggagaggctgggatgcgggaaccaagcctaggctgcacacagcacagggggcctgggcccgggccatgaaaccattttttccccctagacctccagtaaaggaaggggaggggctgccatgaagatctttgaaatgccctggagccatttcttccattgtcttggggattaacatttgactcctcattatttacacaaatttttgtagctggcttgaatttctcctcagaatatgggattttcttttctatcacattgtcaagctgcaaattttttgaactcttatgctctgcatcctttataaaactgaatgcctttaatggcacacaagtcacctcttgaatgtttcgctgcttagaaattttttccaccatataccctcaatcatccctctcaaatgcaaagatccacaaatctctagggcagaggcaaaatgccaccagtctctttgctaaaacataacaagcatcacctttgctccagttcccaacaggttcctcatttccatctgagaccacctcagcctggaccttactgttcatatcactttcctcaaagccattcaacaagtctctaggaagttccaagccttcccacattttcttgtcttcttctgagcccaccaaactgttccaacctctgcctgttacccagttccaaagtcgcttccacattttcaggtatcttttcagcagccccccactctactggcaccaatttgctgtattagtctgctttcatgctgctgataaagacatactggagactggtcaatttacaaaaggaagaagtttattggacttacagttccacatggctggggaggcctcacaatcatggaggtaggtgaaaggcacattaagtcacatctcacatgaatggcagttggcagagagcttgtgcagggaaactctcattttgaaaaccatcagatcttgtgagacgtattcactatcatgagaataacgcagaaaagacctgcccccatgattcaataacctcccactgtgtccctcccctaacatgtgggaattatggaggccacatgctgaaatttgggtgaggacacagagcaaaatcatatcacatatatattcaggtatcttaatattttctcatataacatgggatcaaaagagagcttattttctttggctatatcacattgtttttaagatacctcttacaatggaacccctgagaatttaaaacaatttctggccaaaatggcagtaaccaaggaaaaagctcagttagaattccaagtccatacacatttggaatccaaccctgacttcaaaaacagtttttaagtaagtcattctgtgaaaattaaattataaatgacccatatgtaaagattaattctttaactactatagcatagcatgccccctgaatgttaacagctcttatttgtttcagaagggacttcaggcaacaatttatatcttgtggttttcaatctggcttcatttgtcaccgagttgtgaagcttcaggattaaattttgtagggctagtgaacacagactccttatcaaatgttcttgactattactaactctttcggtattgtgcaaaaagtagaaagaaaaatacataggaccaaaatatcaaggagtttttacttgctgtaaaattcttcccatatttaaaatacatagtacaatacttgttgtttccttaaaggaacattcagaaaaatgtagcactctttatgtgctttccaatgtggtagtcattagccagacatgtgaatattgaatgcttagattatggttgtccaaactgtttacacgtgtaaaatacacactggattttgaagatttagtataagatgaaaacatttaaaatatatcataacacactttgtattgattacatgctgaaattgtaaaattttgatatatttggctaagtaagatatattgttgaagttagtattgcccatttctttttacttgttttaaaacatagctactaaaaaatttataattctaagtgtgctttgcttctgtgactcacatatttcagttggacagtgctgttttaggtgttaagttagttattccaattgtaggaaaatacagggaaccatgtttggattcttaaatatgaagtgtgaggtcagtgtctcctgccttgtgaagccactcctgcttggtccttctcttcttcctgagtctggtgtttcagtgggggtatctttcttgtaaagagagtgaaaaataggtgtaatacatataagaaaatgattagaatgtcactgaatgtcataaaaagaagtgaataaaattgagaaagaagagtgggcagcatatttattctgtcagctataactatgttctttgtcctttttcagggaatctctagaacacgttctttgaaaatgagaaagatagcctgtttattcaccagataaagattacatgtggtctttagcaagaaacatgaactcaggaggatgacagattttaaccttaatttgaatggaagggaagcattgtataagaaggattaaataatgtgacttcacactgtcttcatactagataataactgaaaactgattggcaatataacatttattattttccctgtaataccgttattagaacacaggaaagtggttatccaaatgcccatgctttctaaagaagaaaccaaaggtctgatgtctggatatgagttcagactatctttccactaagagtaaagacttctcggtttcatgaaggacaggctggtgaaaggcaaaaagacaacctataaaatggatacagagagagaagatcgaatcataaagtctctaagcctttgtccaattatgagatatttttcttttgtttcaagactttactgaagttctgtgagctacactcattgtgtaaaattgataaaggttaatattaccatctaatctgttgaatattattttatttaaactgatataccaaaggaaatcatgagctttgtgttagcaaaagggagagattttcagtattctcttactgcttacaaataactgttttatcacacaccaggcctgtcagtgggtggagagcaaggggagggagagcattaggacaaatacctaatgcatgaggaggttaaaacctagatgatgggttggtaggtgtagcaaaccatcatggcacatgtatacctatgtaacaaacctgcacattctgcacatgtatcctagaacttaaagtaaaataaaaaataataaaaagaagttcttaattttatctccagggagagagggacataattgtgaggttcataaagaagcaaatgaaaagtgatcatacttgatttcccaaatggatctttgcttgttttaggagcaaggataagaggttgcttatacacctagttttgcaaaaggttgaatactttagccatcttagcatttaaacattgctgatattctatatcccaagccagggaaaagagattctgactaagcaagaaaatccgaacactgaaataccttagttaaaatgaaaagcaggaactactctgggtttctttacaaaatgcaatttttcctctacaaataaactcattggtgctaatcttgtaaacagtggtaactatggcacctaaataaaaatggcactttatttcgttagcatcatggagggtttataggagattactttgaaagatactcagggagacaacttggggattctgtataactctcttaaaagaattcagaatgctctcagatgatagaggaaattaggctttttctgcatgacttcaagtgaattaggaagaagaaaaaatgttgaaggagaaggacattttgttcaagtttaccaaagagcttcccaacaaatagagattatagtgaaactggtggcatttggaagccctaaaagttcagctatgaaataaagtgtaaagcagaggattgaaaattgttgtaaggtatgctagagtggaatttcagcctttggtagaaattaggtaggatgctaggcaagctgaccttcaaagacccttcaatgctaaaattctatgaaaagcagtgattgatttgtgttagttttctaaaaagaaactttcagtatctgtattgcattaagtattgcaaatccaaatgaaatgcattattatttaaaattgttgaccattttaatacaattcattgtgctctctttcacatccttctttagtgcagtgaagaacatgcttattagtatggatcctcatgttccagaagagtcctttttctgagtggtaaatcaagcatgttggtgtctctgcagcaatcccaaatacaacatagcctggtagctggtggtactgctggtactgcttgtctctagcttgaccttattaaaacattgatcagcaatggcctcatgtagcttatttgcacacagcggccccatagtagatatcatttgtttcatgccctagtagttttgcccaatgagtagtttaaaagacactaaacttaaaatcctcacagcactgcaaagatgggagtttgtctctagtttctcactcagttggaatgacaaaaggttagagcaaaaagaggaggtgaatattgtttacttcagtggttctaaaccctggctatcctttagaattgaagagtaaaaaataattaccagagtctgagccccctacttagggattctgatataatttatctacagtgggtgctgggctctggtattttttgacagctccccaggtaattctaatgtgaagccaaggttgggaaacactagtcttttctaatgtttttcttattatactttgttttgttttttaaattgacacataataattatacatgtttatggagtatatagtgatgttttagtacatacataaagatcagattggtgtcattagcagaaccatcatctcaaacatttatcatttctttatgttgggaatattcaatatcccaacagttagggaactgttgtatcttctctcaagtcttttaaaaacttaggttataatcagaatagagcaatttttttaattaacattgggtaaaatagtttctttttttccttttgatatgttcgtttcttaaatttaaaagtaggaaatgtctaaatgtgttcaaataaatgaatgatcaaggccaaaatcagaagcaggttttatattttatggaaggtacttttgcataaaagaatccataaagaacatccagtatgttttctctgagtcctctgaaatgaacaggtgctctcctatttagttagacctctcactactgaacattataataatgtttgggaaagatcagaattaacaatgagtcagtgagttacccaaaattgagtcagtgcttttcttcggagagtaataagataagttgtgaacaaaaactgaggtatgattaaacggaagtagattttcatacacctcaatattacttatattttaggtttcgctcaagtttttcttagcctttatcagcaaaaatagaatttgcttccaacggtgctaatgaagtgttgtcaatgaaggaattacaggggtatagtcaaggtaagggacaaagccagggttgatgcaatgccaagaagctaatgacagtgggaagcctaggtctgaaaaagtaaaggtgcagaaagtaaaacagagttactggggcaggagctgatgcagaagagaagggccactcaatggagctgtgggattggaagtcactagctgttctgcactactaaaaaaataaagaaatgaggaaaaacaagaaaaggaaaaaaaggaggcagtccagagatagagagggatacagaataagtagctatggtctgtctctcttttgccctccaatttcttgctggtatttactgttagccaaatgaaagccaagtggagcttcctccttagcccatttaccagtagagttctcattgactcttttcctcagggctgttttcctggactctgaagtctaatgtttcctgatacctctatggaaacttagggttgcagtgtgttttactgaattcttggacactgcactttgctttcccatctttattagaatgctatatcttatgttttaacttgagtgccaactcttaactattagtagcatttactaaaaaatattctgaatgagctttatgtctttgatatttcttgccaaatcagaggttaaaaagaaaaaaaagtttcagaaactttatagtcttttcccctaaactatattattgcttttctcattttataactctgcaacatgaatttggctataaaataaaaatttcgttacttttaaataataaatacaaaattaatgttttcttattcttgctatgtaaacatttctatgtacttctttagatttctgcgtcaaactttttctttcaagattttaaatcaaaggccagaatttgcttagaggtagatttataaataatgtattaaattaattttttaaacatcaaagaaatcacttatggtattattaatgaaattggaattaaagattgaaatcaactagttcttagttaacatcaatctttattaattcatctattcattcattcatggagctaaatatttattgagtggttattaccgtatgtcattgaatgtaagttgccatcaattttaagtagcatcctgatttcagaaacattaacatgtaaaaaaatgcatactttagaattaatgaataatatgtgtggtgggtgtatttcaatttagaataacttatggttgggaaatagcttatgatctagaattgataaccaaaggcaagcaaaacaaaacaaaaccggattactggagtttcagttgtcatttttatacgttgcttttcttttttcaataagtctgtttatgtcttgaatgcgggaactgtattgtacttctttgactttctctgtggtgtgattacaaaatgtaatcatagaatgttagttatggaagagactttggtgatcatttagtcatctagtccaacttcctcatttatagaagaaggaatcagagaagggctagcttgcctgatcacctagctagttagtagcagagtgaatgaacactgaaattcagttctcaaattcttgttccagtgttttatctattattatacaatgtaggttttaagagtagatatcaatgaatatacatatgcatgttgtacgcttaccgagttcataattaactccaatattagtcctccgcttaggtgctagggttttacttttatttaaccgtagtacaaaaaggcttagtggtatcttttgtcatctttagatatatacatgtgttagtagtaggttttactttagcaaaacttcatccatttcctgttatattaaatggctcattcagtcttcttttgggtgcttttgttcttccttctagtaacaaaaattataacttagaaaaatatataaataatttatatgtatttgtatatttaaaaatagaatatgtatcatttgatctttcagtattcaatccttatcaagcacttaatttttaatttctgtgatgagtgttttcatataatttatgtaattttgttgcacttagtaatgagatagtccctacccgcagcctcctccatcccctacattacctaaattaattagtatacattttttagtcatgtagatacagaaaaagcttgccctgaagctttgcagatttggtgagtagtatttattatgcaaatttcctaagtgttcaaagataagttattttccagcatttccagtaggaaatgattggtagtatttctgttgagtacacaaagctgatttcgcctttgaatttaactatcacactttagcaccggctctattgaaatgttaatgcacatgtgacgtgccaacatttagaaaaatgtaaataaaattggaaagttccaggtgaatttatatgttccctaaaagctgcagaatataattactttttgactttcttcattctggcttaaaagttatagtttcatgttcatttctgcttttcaacgccttgtatcttatgtctcattcacccttccccactaatctcctgaaggcatagcacatgaagcctattatttaagaatgttggctttttagtttcaaaggtttaaatatgaatcttggctcagacttctaactagcgatgtgattttaggtatgttacttgatcttcttagacttagttctcatatatgtagaatattaaaaagattaaaacctcacaagattattctgaacattcagcaggaaaagtaatataatcttttttggttcagagcagttttagatacatttaagctgatatttttattttataatattcacacaacaaaaagtagattgctgaagctaagaaacctataagacacagcaaccacattttcttaatccagtctatcatttatggacatttgggttggttccaagtctttgctattgtgaatagtgctgcagtaaacatacgtgtgcatgtgtctttatagtagcatgatttataatcctttgggtatatacccagtaatgggatggctgggtcaaatggtatttctagttctagatccctgaggaatcgccacactgacttccacaatggttgaactagtttacagtcccaccaacagtgtaaaagtgttcctatttctccacatcctctccagcacctgttgtttcctgacattttaatgatcgctattctaactggtgtgagatggtatctcattgtggttttgatttgcattctctgatggccagtgatcatgagcattttttcatgtgtcttttggctgcataagtgtcttattttgagaagtgtctgttcatctccttcgcccacttgttgatggggttgtttgattttttcttgtaaatttgtttgagttcattgtagattctggatattagccgtttgtcagatgagtagattgcaaaaattttctcccattctgtaggttgcctgttcactctgatggtagtttcttttcctgtgcagaagttctttagtttaattagattccatttgtcaattttggcttttattgccattgcttttggtgttttagacatgaagtccttgcccatgcctatgtcctatgtcctgaatggtactgcctaggttttcttctagggtttttatggttttaggtctaacatttaagtctttaatccatcttgaattaatttttcactcataggtgggaattgaacaatgagaacacatggacacaggaaggagaacatcacacaccagggactgttgtggggtggggggagggggagagatagcattaggaggtatacctaatgctaaatgacgagttaatgggtgcagcacaccaacatggcacatgtatacatatgtaacaaacctgcacgttgtgcacatgtaccctaaaacttaaagtataataataataaaattaaaaaaaaaagacacagcaactaaacgtcagtgccttgggggagctatatgtataattgttctcgcttccgtgaaaagccaggaagacaacacaacttggagaactatccctgaaggaatagcacagagcagaaatacaactcaaaaccagcgaagctatccccagggatacagagaaagagtctgcaagcattttgcaaagcaggcgttgaaagagaaaaaacttccttggagagttgtgtagcagatattagaattaaccaatagatagaaatatagaaacagaattgatgaagaattgataagattttgagagaaatgacatcacatttttaaaaatcaaaatgcagtgaacccctacccatttaaaaatttatattttaacattcctgaatttggaattgattaatgtcctgtcttcccccatcaagttgattttctatcttataatcaagtcataatcctggattggggcaataaaataatatatgctttgctatattaactaatacactttgaacaattgcagatgaaaatataaaaaaaattcttctcatttaaatataatcgctcatacaaacacacttttatataaggccattacaatataggcagaaatgggatatagaatataatgagacactgaagaagagtaatctgggatcatggaaaaggaagatccaaatgagatcatttttcattgctttgatcaattccttaattgtacaactacaaatctgttatttatggtttgtaacagataggtacatgttcagttcactctttggttacctgtaggtaagtgtcacctcacagtgtggctaaatcacttcgaattgaattttttgttgtcttcataaagtcctgaattagaagaattccattcttctatgagacatagatactaaataaagctttaaattgcaagtaagaattatttgacaaagagaacaggctgtggccattctaagaatggtttccagataagcctgtttctgttcggtaactgtgttaacaccctgctgtgttcttacatggtcctctattgtgtattttaacctgggcattgaagtgcatcagcaaagtctgaccaataactccaattgacttttccaatcatgttcccattattgagtctttgacatccaaggaaagcatgtctttctctgagcatcctctgtttctttttgtctcttattttatgccactcataaagcttcgtttattgtgaaataccctccttgacttatctctgtaggatgaaatcctaaccaaacttcaaagcaaatctcaaattgtcactctccaataagatgaattgattatcataacattaatttcttttctcagctcttccatagcatatgattatacttctgcctttagcattttctacagttagttttgcattatactattttctagatttatggctctgattatctacagttctgtctttcccagtagaggtcacacatttattgagcacatactatatttggaattagcagtgttgaaatgagatggccgtattccttgctttctcagatctcaagtctactgaggacataaaaaggataatctctaaaatggaatattggtaccattatagataataatagggtgtcatggggctaggaaataatgtgggcctgggtcagaaaaaacttcctggaggaaatgaaaactctgtaaattggcccttcattgtatctctcacttaaaccattttgggtggaattatgtttcctgtgaatccttaacttatatttatgattacaaaaaataagatttactcctttttgattctttgtgtaaagctctgttataatattccttccattcttccttatatttacatgtatgtgcaagtgtgtgcatgtgcatgtgtgtactatgtatttttgtgtttgctcatcgagggggactttgaaatcttgatcagggtatacacagtgtttctttacacttgttactctgaaattatctgtttcacgttcatacacttttacaaggctctgaattctttttgggcaagtgccaccaccttctcataatcatagccacaggtggtcagctcatatagggcaggcaccctgtaaatgtgttgagctagattgattaatgtgtctatatgcatttttttttcctcaggagaaaaaggtctgttgaaatctttagttggaatatgtgaatattcttgttactatatatagtctgtaactatatggaggaaaagctttgagggtggaagagacatttgcaagctggagaaaaaagaatgtgtcagtatatgagggaatggtagagggaaaagtagatggagtgggaagctgggggcggtgaaaggtggtaaagtgagacactaagtgacaataaaccatttaaaaataatttgtcccaaagttctggctattctgaattcatctttgctgagaaattttacatttttggctcaccttttgggaaggtggagatttaggctagggaaaaagtagacaagtacaagtttccatggaaacaattaccataaaatatcgaccaacaaagatattaggaagcaggaaaggaaagagaaaaaagcaggaaagagatagttgccatggaaacatggacaatcagagacatgcacttgaagtgattccttcttatttattttagttaaatacctgattaaaattgttatactttagtttgtggtttatttttaaatattcataaagatttgtttaagaacatgtttttctatcttggtaagttataaattcacaggaattcagggaatatccttttattttgattggatatgacatcattttattgattacaaaatccatttaaaatatggcatttaatatataagctatgaaagcattattttataaaaatgactgtttaaaatttactctttcttcagagtaaattatgttaataatttttcttaatgaatgttaacatttttcttaatgaagtttaaattattgcttttaatttgcattgactagcagcataaaatactctaataatattaagagagggtcattccaagcattttgatacaataaaagcaggctcactttttctccaaacaattttgtatgacttaaattttgagatcctttttaggtttacaattttattttggttattttggctgtccacttactatataaacatgaaggagttactattaaagacaatatatctgtagtggataattatataaagattagatgattcaaaactgtcccatctatagataaatgcaactcagagaaatttggattgataaagcagaatattaaactccaatgttggctataaatttgtaggattcaattttaaagttccctttgaagagtactttgggaatatattctgaaatgatttcttattttttcattgctgtaaaactgaaatgtaaggagcttacatcatttcccaccagatactgataggaacttaagtattcccttaagtgtcaacttaaattgaattaccttttttgagaattactttcccctcctggctgtcacctcttgtcatcttctttggcatccagagttcagcattctaaaagaggagcatgtagacctcctgtggacagcttccctgttatgacagattttttgtatcttaaaaagtagcttctttagatgctgtaagactacgtgttatcgataacctttgcaaaataaagcatgttgatttttcagactctgtgggcaactgaaaagcccttttgttttcttaaggtcatagaactttataggtaggaggaacttagaggttaatttgtacaactctttaattttaaagcggaaaaatttgaggtacaaagagcctaggtgacatgctgaaggccatgtcgcctgtttgtcagtttagtgttctcttcacagcaccagtacatctccaagacatggcttggctatgttttagcctacaccttcatctctcttaatctacccctaagccaccacacgtacatgtacacacataaaccgctcactatgcacaggaagctttaagccaaatcattcactgcatgcttctcctataaagaaaattctgaaggtccatgaataccatgtaggctgcttaagaaataatgagcaagcattgaagtaaaagagtggtgtccttatttctaagtagaattaaccttcccctccaaaagatacacatccacatcattatcaagtgtaaaagacagctgatttccaaaatcatttgatttggactttccttctcttttcttagtgctaacatttttcacccatgttgctaacattttttcaaatgtgtggatatttccttataatttctctaagagaaattctactactaaaatgcttttaccaattttagtttgtagacttaacatttctgggggaaaggagtgcaagcagctaggtggccctccagactactaacaagctggagagtggagttttccctgttaaagagtgactatggctgttttgagaatcttggtgcctatacaatgcagcctttcaaaatggttcccacatggccaactcactaggattctctgtctttccattctagtttagttattaaattacacagaattattcaggtatttagtcctaaatacctgctctgttctaggtaacctgctaggttctaggaacatcaaggcaaatcatatatggtccttgtcctggaattttttcagtctagtggggatcaaagtggaacaaatagaaaataaagtataatacattgccataatagaaatgggatctcagagcaaacacccctaatgcacatctgtggaaactgtaggattgatgaaggtggaggtgaagtaaacaaacaaaatttaaacagcaaataaaaaaaatcccacttctctaacacaagttgtattcagcctttagcccttttttttttttgtacattcagccagttccttatagaaacatatttgcccttgtacagtgatttgacaatgccctcgctggggtttgatggccaggcctgccggatcttgtgattctctgggacagggattgtgtcctgctgtgtctgctgtgaattggtgcgcccaacagattgaacccttccatggcacatctacgcacctttctttacaatgtcacctagtacttaagagcaatctgtgggattaggcagatctgtgtttgatttgaggctttaccacaaactgtctacattatcttgggcaatgagactttatttcttcaaacctatttcatgttattatggtaagaattcaatgagacagtgttggcaaaagttttagaagagtacctagacaggaaagtctcaataatatgtcaagtgctttatgatgacacgtatgactatagaagggatggggaaactaggtactagcagtcttaggagcccagctctgtacacccagctcatatcaccctcctccactctctcttgtcccacctccctttcctttcttggcatgtggtgatgcaactgtgtctcccccttgtgctttttgaaaaaaaaatatttgcagccagctccaagttttagttggcaacaaatccgatagtaaaccagataacatgcttctctccaaagtaaatataaactgtatcaatagaaatgtagtttttggaactctggaaattcttctctggcacccctgtggaccatatttgaacacttagcctagtttcagatgctgcctctaaggacattaacaaacaagaatgaatcctaggaagggtgtgtgtattacttaatggtatgaaaaccatatcatagaagaaaaaagttcaaagacatagagataatagtgtggaaaggagtagacccagggtatatgagagctaaatttaatacagatagggctttaatgtcgagtgcagtgttccttgggaacttcaaggctggaatccctcagccattgcttatatgttttgagcactgtaattcgataggtggatagcacctgatcttcaggcaggcaatcttacccatttcaggctcactagctgtgtcagagaaggttgtggaaatgtgattgctcatggatatgtccttggaagagggactggaagacctttggtttaatgaattcatctgcacatttataatggtgagcatatccaaatgttttcttggtcagaaaaatttaagtattaataataccttccttttgtgaggaattgtcaggtcatgcttcattttgctcaataattattttatctcctttctaatagtgctgattaagcactatttcatttatttaagaaaagcttactgaacggagatacttggacaaaagagaacaaagcccatgctcgttgaaaacctaagtcctatgagcaatgcctttatttaaattgtactaatattacacataacaatatttaccattttaaccactttgaaatttacagctcatggcttttagtacataaacactattttgcaaccatcacaaccatctagtttcagaatattttgatcatgaccaaaagaaattctgtacccattgaaccagttgctcctcatttccccctcccccagtccttggctgcactaatctgctttctatttctctctatatgaatttgcttaagttgttgttcatatgaatgaaatcatataatatgtggcctttgtgtttgtcttcttccactcagcataatgttttcaaggttcatctatggtgtagtatatgtcagtacttcattcctttttatggctgaataatatttaatgttatggattcaccatcttttgtgtatctgtttgtctgttgatggacattcgagttgttttcagcttttggctatcgtgaatagttgtgatgtagagcaggtgagcccccaaattgggtcttagcgcaggagggtttttggctctgcccaggaaagaattcaagggtgagttggtgatgttagacagcaatttttactgaagtggcagtgcacagcagcagcagaagtgttgtttcttgtagaggagggctactccacaggcactgtgcccagagtagccctgctcttcaaggagtggtacctctgctactgctatacactgccacttcaataaaaattgctgtctaacaccaccagctcacctttgaattatttcctgggcaaagccaaaaattatcccatgctaagccccaattttggggttcacctgccctacatcagctgggctatgaacatttttgtacaaatttttgtttgaacagctgtttaaaatgcattgggtgtatgccagagagtatcattattgctgggtcatatggtaattctttgttaaacttattaaggaagtatctatttttctaagtgagatttccaggttttatagttactggtttacatgcagtttgtggaattagaaaaggttctcagggcctttattccctctttttgagagatttagcaatattctgtttgacatgagaatttctaaaaatccatttataatactgaccaaaattataatcctgtgaataaatttttaggaaagatcttatctaggaggggctttctatatgccctacatatcattcccatttcacaaggagttgtgcaattggagccctggccttgctgcctcaagttggtctctggcaccatgcaacgggaagaagacctctgggctttgtgagctgaactttggctcatgctcatgttcaccaagcagaaatgttctttccaatttttaggtttttcaggagaaactgaatatctaaatttttatatgatgatcttctatgtttttaatgccggcaactcattcacatttaaacaaaacaaaacaaaacaaaacaaaacaaaacaaaaaaaacaaaacaccatgggccaagcaaaacaagtctgggagctgaatttgatgtgcaggccattgatttactactgctttctttttctttctttcttttttttttcttctaacttttgttataggttcagatggtacatgtgcaagtttgttatctgggtatactgcgtgacactgaggtttggagtatgaatgaatccatctcccaagtaggaaacatagtacccaataggtagtttttcagcccttgcccacctgctcttcttatatttcccagtgtctgttgttctcacctttaagtccatgtgtacttgatgtttagctcccacttgtaagtgagaacatgtagtatttgggtttccatttctgcattagtttgcttagaaaaatggcctccagctgcatctacgttgctgcaaagcacatgatttcattctttttgatggctgcataattttccatcgttatatgtagcacattttctttatataatccagagttgatgggcacctgggttgattcagtgtctttgtgaataatgcagtgatgaacatatgagtgcacctgcctttttggtagaacagtttattttcctttgggtatatactcagttaaggaatttctggatttaatggtagttcaacttttagttatttgggaaatctccaaacggatctacacagtggctgggtacatccccaccatctgtgtatgagttcccctttctctgcagccgtgccagcatctgttgcttttagactttttaacaaagaccattctgagcagtgtgaaatggtatctcattgtggttttgatttgcacatctctgatgattagtgatgatgagcatttcttcatatgtttgttggatacttgtatttcttccttgagaagtgtcctttcatgttctttgcctactttttaatggggttacttgtttttcgcatgttaatttgtttaaattttttttatagattctggatgtttggcccttgtcagttgcatagtttgcagatactttcccttattctgtaagttgtctgttgactcccttgttagtttctcttggtggcagaaactctttagtttaattaggtcttacttgttaatttttgtttttgctggatttgattttgaggacttagcgtaaattctttgccaaggccaacatcaagaagggtatttcctaggttttcttttaggatctttgtagtttgagatctaacatttaagtctttaatccatcttgagttaatatttatatatgatgattggtggtgttcagtttcattcttctaggtctgattgctttttctttatgagcataccaccactcagatgattacaatacaataaaatcaataatagctaatgcatttatgctaaatactgtgttctggcactagtgtaaacatttaacacgtgtcaacttaatttaattctcatgacaattcagtgaggtaggtgtaattttattgccattattgcaatagcacacttttcagagtactttggttatttatttatgaacttgatttcctttatatgttgaaagttccttgtgggcatgaaccacgttttacttacatttatgacctcagaactgagtccagtgcctaggatatgtagatattctctaaattttggttaagtgaatgaatgaatggtatactgccctgactataattctggtctgccctgcaatagtaagaatactcactaatatttaaggctttctgtgtgtttgggacagtgccaggtacttctgagagatattaatttattattaaaggccacattgtgaagaacttgggttctcagtctctagaaataaatagacttcccgattcaaatcttgcctttaccaatttttgtttgtgtgatcttggtcaaataacataactctatgtactttattttttatatcttcagatggtgacaatgatgtaataataatcatacccaacctcttcaaatgattatcacattctctgtactgttctaagcaatttgtaaaaattatttctcacaatggtagccagttcgtggattttgtgagaattaaataagttaattcatgtaaagcatttatattttgcttggcacatagtaagcactgagaacagttggttctttgtattataaccattttacgaaagagaaaattgagtagtagagatactgagtccatttttttaaggttgcatggctagtaaactacagaattgaaattgagactgctttctaccttgcttaaagcctctttctttctttcttttttttttttcaagatggagtcttgctctgctacccaggctggagtgcagtggcataatctcagctcactgcaacctccacctccatggttcaagcaatttccctgcctcagccttctgagtagctgggactacaggcacatgtcaccacgcctggctaattattattattattttttgtatttttagtagatacggggtttcaccatgttggccagactggtctcgaactcctgacctcaggcaatctgcccacctcggtctcccaaagtgctgagattacaggtgtgacccaccaagcccggcctaaagcctctttctttaatcaccatgttgtgcagcccatctccttatatacactttccccttttctccacctatgtagcatgtgcttaatctctagaatcgagacaaaactggttatttctcccttctccaacccattctagtgtttactgggcaattcgtcttttaaaaatcatgacagcttcctcattatcactatcataaattgtactttaaatctgttcatagatcttagatcttgtcttttcatttttttctgcatcacagcctagcacaaaacctcatatgaaaagcgcataatacgtgagaggttctagcaggtgggaagaaccactttatcaccttcatcaaagaacactcctgttctcttcaagtgtgggccacttagagttttggatggatgagcataaaggagagaaagagacccaatctaacccccacaatccactcatcaattcccttatttattcaggaaatacatgtagatataatgaataaaccctgatgataaaaaatgggatggattttgccaccagagagcctgcacatctttctcttatagtgtatattgattctcttaaaacagaattaaaaatgaaaatgtatgctctgaacacactctctcactgtctcggtttctgtctctccctgcttcttttctctctctctctctctctctctctctctctctctgtctctgtctcttggtctctctcaatttcatttaatgcttttttattttcagtggaccctggggagtggacaagtatttctagttaaaatataactatttatagttaaactcctgctgattgggtcacagttacactggtgccctatttggtgacttgagggagcttgaggatttggaccctttatctctgtcattttgtatatctggcagcctacaggttacatgtgaaatatgccacatgaacctgccagtgctttaagttcccagcagatattctgcagagtagtagcacatcgtttttgtagtacatctgtaatgccatgtaatgccactcaccaaattccagcaaattaaagaaacttcagagaattcaccacaaactgattagagaatagaaagagttatttagagaaaagattaaaggagctaattagcacagcttgatggagtggggactaaagggagagctaatggctctttgatattatttgaagatactaaatgtcaaggaggaaaaaatattttgtataatgcaacaaagtgctattaagagcaatgagacagaactgagaatgaaagtattaaaatgaagtatgtgagaactctattaaaatacaatttgttaaattgtgaagtagtctttccaattatgaggtagaagatcttcctcaaagaaataaaaatacacatataaatatatactaacaagctttaatgaaaataattttaatacttgttggacagtttaaatggcctgctgttttaaacgtttattaatttcaaatttgagcaattatttcatcccaacaaaagcctgttctgtcctcagatatttctacatatcctgaaaaaccctaggtctctaactctgtaagagaggctgagaataccaatattttaaaaattattctttaggatttcgtttcattggcacatctctgagaataatgggagctattgaccagattgacatttctgtggttttgtgccatggcattttccattcccaagtgagaaagttattccagttcatacagaaaaaattgtgtcaaagtgttaccaaccaaattccacaaatcaccatgacactaccaatagaacatgcctgtaatgtaagttgttgaaaactgagcaaataagatgcgttgacaaaaccagtcagtctaagaatattgttatctttttaccaagtgaaaagatactgctttataacttgaattgtagtattggggaaaaaagggaaaagaagagacttcattacatgagtaaaattcaaaacataattattgaaaacattagcaaaggttttactgtttggatgttattgcagaaatagcctgagtttataataaaaatgataggaagtctatagaaaacaaagtgggaaaagcatgtcttcgccagtgtgtccccaggtgctgaggagccccatcttagaggcaacatcaaggtgtcaccatgtgttacaggtacactctggccttcttatcgcttattagagtgttggagatttttattttgaaatattaaatgtatttttcttttcttctttgttaacttttattttagaattgtgggtccatgtgcaggattgtcacagaggtatattgtataacgctgaggtttggggtatgactgaaccatcatcctggttttgagcacagtacccaataggtagtttttcagcccttgctcctatccctctctccacaactagtaggctccagtgtctgctgttcccatctctatgtccatgtgtatccaatatttagctcccacttgtaagtgagaacatgttgtataaatgagaaagagatctcccatcttccatttggtccttagtccagaacttctaaaacattcttccattttttgtggtctgacttactcacggctactgcatcttttacaaagctttctccatggtcttttgctccatgtgaggaaattcaattttagtctctatttcttccttttcccccataaaaattgctgtttagtcataagagataaggcatctaacattggcatcaattgagattaattcacctactgcatatgtctcttctgttatcaacgttctccatttcattcaaaaacttcagtgctaggtcctcttcacttgaatgttaagtcccaccagcctttgtctgagaatcttacatagatgatattccatgtcccaaacattctgaggtctacactttccacatagaatttcaacaaaattcaccttataaaagaaatttagtgaaaataagtctctttgaagtaatgtttaaaaaatctcattgaaatatatattctaataacatctatctatactaatttctcaagtagaataaagtgtatataataaataaagaaaattctatgtatggaattagcaattcaattctatattgttgatgattctaaaggaaatttcatgttttatcaggaaccctggtagcaatatgaactagtagaaagtgtccagcctatagtagtagtactggagagatttggtcagtgttgtaacagtttgctctgcacgacaggtggatatataaaagcccatcttttctttactataaaacattctacacgggagtgaaaagtaaaactctctctctctctctctctctctctgtgtgtgtgtgtgtgtgtgtgtgtgtgtgtgtgtagctatgaatactctggatttgcaaaaacaccactttgcccattaaaatagcatgtactcatttcacaagtcatctagtctaacatgtcatcagattcctggaaaggaagcttttagtgaaatactctttagatggactaatatattttatacagtcttataatacaaaaggagagttggaagggcatatgcagaaagaagtaagaaaataaaatcagaggagcattaaaacaaaggaatatgatagcattcactcccattccccaaatcccagcattgattaacctggtcctcattgcatacttcatcaggtgctactttgcagtcttcttttactattgacttttatgcttattttgcttttcacatctactgtcctctactggctgagaacaaggagcctcctttgttctctctgggctccttgcttatccacagtaggagagcattttaaacctaagtgaatacctacctgtggaatcgatatgaagattaaattcttatgaagtacaaggtataaaaaagttatctggtttccattacttctgtttctcttttgacaggactttctctttttccaaggcccattcccatttccttgagtaagtgtataggctctggcatcagaagacatgggtttgaatcttggctctgtcattttctagttaagtatccttgggtaaattggctcaatgtgttgtgcctcattttgtcagttttaaatggagatagtactagtatctactgtataggaattttgataggattgaaataatatatatatatatatatacagtgcttataaagcgctcagtagaaaggctcaataaataaatatttgtggtagtcattaataatatatatttatccatttgatttgttttccaagaacaaaatttaattcattattcactgatgaaatttgcttaaaaatattatgagtatcatgtaggtttgaaatactatgctaggcatctgtgaacaagacagaaattgtggtttttctgtatgagttcagaatctagtgggagataaagacaagcaggaggcaatgggtaggacaattactatgattaggcttgacctttgactcattcatccctcctccatagccaatcacaaaatcctctccaaagaaagaaatattttcttcaaagtatttcaaagtctctcctttgcagtcttctgccgcctccctcatcctgcagtttgttgttgctttgtgcctattaccacaacagccttctagttagtgtccatgcctatagtattttctccttcattctctgcctgcgtggccacattaatcttctttaaacaatgctttcatcatgtcactgccctgttcagtaactttaaatagctcgcttgtgcctcctctgtcaagtctgaagctatctgctaacttataagaccacccaccatcagtccccagcctaactatataatcattttttccacttctcctcacagtatagcaggcattctagtgagcatgaaaactgcatgccagggacactcaatcctacctccagacttatcactattgtcatagaaatgactaacctttgagtgcttaaggggtgctaggtattgtactcgctgttttccacagtttatctttaatttttataaaaccaagattcttcatagaccttattatactgatttacaaatgaggaaaagtattctgagagggtcaggaatccaggatccaaatccatgtctgtttcatctcaaattcctccttcttttcactgtacctcctccattccatgccgctcatttgacccagaatgtttttctcctcattctatcaatacaaaaaccttaaattatctccataacctaagtgctggtttaagttctatctgttttggaaaatcactaactctttggaaaatctgtaactctcccttcactaatttccttcattgttaaactcctgaaatgctaaccatcaatatcaccttgttcctaacctttacacttgtatcatatggtattattctgtatgtgccagtcttctttcttcagctacattgtaggtatattaagcatgaacactccatgttatgtcataatctctcagatgagtggcagtttttctcagcctgaagtgtatacataatacacgcttgttgataggattatttgtcatcctcagccattgagttatcttattttcttgggtccatgcggtcagtacagaaagggtaagccttaattcaatttaaaaaattatacctcttacaagagagatagaaaatataacaagagagtacatgttggggtgaaagaaaatagaaaaataaaagtggggacaaagttgctgggaatgtgactgaaaacatacaatataatgctggaggtaggtcctgtttcctatcagtcaaaggtgaaaaaacaggagccttctctcttacaaaatgtattgttcagaagataaaacgcaaatcaatcgctcataagcagtaaatctatatttggtatcaagaccagacagaaatttctccccatgcgttctcattaagaggaaattgagtaaagtcgtgaacacccttgcaaacattattacagtattaacaataaagagcttcttaggaatctttcttataatgaccctcagtctggccaatgacatcatagcaacaaagtgaaatacattaagaacaattcctcaggtggggaccagagcaaactctggtttagaccccaagaaactcatccagtagaagggctgagggatcaaccctcaaagtaggtgctgttccaaatcaatgctctaggggtctggaagctcaggtgtggaagtgaggatcagatatggtaggtctggcctgcttttagtcttttttcaggtatgtgatagtatcttcattctacttggtgatctgtctaggttttagtagaaatttagactgtggctagcactacagtggaagggattctctctgctgggaacaaggcagagtcccaagcattgggctgaagttacaggcatagttcttgttttggttggaaacagaggtactgatcaagaaaccaaagtgaacagccagtcacatgcatagagttagggcagggatggtgggggatgtgggattagcttgatggacttagggatgtgctggttcactcagttaggatgcaccaagtatcacgattagtaaggatggggctggaaatatacctatgccaggctctgttctcattggctcagcagtggtccccagtgtgtagaacggaatcgcctggggatgcttgtcagcatgcacatccctgtgccctacccaggacctcctgagtcaatgtctttgcaggcagctgcgggtttaacaacctccccaagtgcttctgatgtagactaaaatttgagaaccattgaattagggagtaagtggatgaacctacaggtttgagatataagtatctgttcttaggctgacttgaagctaacattggacacagagcaattttagtgggacttagaggaatagacaccatcaaatttttcataaagcattgaatgatgaaatggcttggaagaagtcattgagttaaaaatggaatttttatgacagaagtgcaaacaggaaaatttaaatgtcctcttaataatgagagaaggtgcacatttaatgaatggggaagttttaatatgagctagcagcacaccctgcgtttaccttcatggaaagcagctctcagagcacctgagaagttttattttgggagaagggagatctagagggcccacatgcagctagggaaataataacttgacagcagatgaaaacaaaatgataggttgctgtaggaaacagagtggctgggtactctgactagaatgtttccctggttctgaatacattataactgcaccagcacgaagatccagggcatgcagtacatatttcccttggtcttgacaggttatggggaatcatgacaagctttgccttgtcaaaaaatagatgttttgactgcaagtttgcgcacctgtctttgatgatgaggagctcatcccacgctgctgcttgttgtgttattgtttcatttgtttgttgtgatttaaaatggagaaagaaaagaattggggaaaacgtttgaaccaaagcaatcagataacttcaataataaaatgctacccaggcttttgtgataggaaacctatgcaatcccactgctaattctgttctcgctatagggattcatggagcctattttatcagctcagtggggttcaatgtctctccactccgatgggaaaaaagtggaattatcaccagggtaatgaaaaacaccccatcccatgtttatagcatgttttattaaaagcatgttgctttggcctcatataccaattgcaatatgtgagtgtaagatgccagaatagctctcaagggaagcactttccttcgtgctaatttaaaattcctcgaagagcacgcagtcaggtgtggtgttaatattttgtatcttttctacctgagattttcataaaggagatgataggtggagtagagtaaagggtcagctgagttttggagccacctggccagggctgggaatttactatgatttgctttcacaactattctttacatttctgatagcccacactctcttattttatgtcataatcattagggaatttgaatgagtgttcctattatgattaagtaaataacattttacttataatttctgttaataaccacattttactttgtataaattaattttctattatgccagtggaattttcacatttgactctttgtttctgcgaaccttaacccaatgttgatttttgcaaactccaccattagttccttccaattagcatttcattctccagctcatctttatcctaattctttcaaaactttagggcccatattaagttctaggacaattaattcctaccacagtgtgtagttgagtagaggaggtagacttgtaaagaaataacaccaatatagtgtgacaaagataataatagaggtgtttaaagagagaagtttaattgagaagagtgatatttcagttaggtcttaaaggactgagtggaaattcaccagactttgaagagaaaggtgcttatgcctgggagagagacctgcatgtacaagggcatggagttatggaagaacagagtgcttggcatgttcagagactagtggataagtctgtacctgttctttatattcacgtattgcaaaagataaagccagaaaggtaggatcaaaattgtgaagttccttatgttctatacagttgggcttggtctttctcctatgggtattgaaagggcagtcaatggcaagtaggccagtatttttaaaagtatcttacaaagattactctggcagaagtatgcaaaatgatctggaacagtccagactagtggcagggaagtcagttaagagtttacggcaatatccttcgcccactttttgatggggttgtttgtttttttcttctaaatttgtttgagttcattgtagattctggatattagccctttgtcagatgagtaggttgcgaaaattttctcccattttgtagattgcctgttcactctgatggtagtttcttttgctgtgcagaagctctttaatttaattagatcccatttgtcaactttggcttttgttgccattgcttttggtgttttagacatgaagtccttgaccatgcctatgtcctgaatggtaatgcctaggttttcttctagggtttttatggtgtccaacaatgatagactggattaagaaaatgtggcacttatacaccatggaatactatgcagctataaaaaatgatgagttcatgtcctttgtagggacgtggatgaaattggaagtcatcattctcagtaaactatcgcaggaacaaaaaaccaaacaccgcatattctcactcaaaggtgggaattaaacaatgagaacacatggacacaggaaggggaacatcacactctggggactgttgtggggtggggggaggggggagggatagcattgggagatatacctaatgctagatgacgagttagtgggtgcagcacaccagcatggcacatgtatacatgtgtaactaacctgcacattgtgcacatgtaccctaaaacttaaagtataataataataaaaataaataataaaaaaaagtttacggcaataattctgagactagctgaggaaccacagcttgagctgaggttgttgggttggaagaacattgctaagtaaaggttaaatgaacttggtgattgcctgtgtgaagcagagaagaggggtggggaggacacagtgaatctgaagattctaacttagggaattggctggtgctatgtcaactcagacaaggcatctgtgagaagagggctatttatttattttttaaggacaggaagttagtaagtcagttttaggatgatgagatccaagaacctctgagtatccaactggagatgtttagtatttagtcagataaagaagcctggggctcaggaggaaagtctagacaggagacatggatttgggagcatggggactaattattggtctgcctgaatcatgaattcacaatgctattaatataacctattcgtacagctgcattacatagatgtctcatttacagattctactctaataattcttaaatatttttacattttttgctactgtgtcagatctaccctatgctatacttgtatttttgcacctttttagactaagtgaagtagaagcctgttaatttatcttttttcaatgtcaatactattgaatattcaacaaagaagtggtcagaacttgggcttcagagcctagtagtcattggggctttttttctcttctcccggacacaatgccattatatccctcctcttcccccatctccaagtaagatttagctacgtgactagcttttagctcttgaaatgtgagtagacagatcatgtcatttctaggtagaaactttaagagttagtttgtgattcatcacatcctttttttctgcatctgcagccttggagatagaagccctaccaacaagggttccgaagtgactgtattgagcagagttctccatatgacccacattagacacgtagtgagaatgagaaataaaatgtactgcactaagccactgagattgacattgttgttatgaaagcataagctagccagtctggttggtaaagaggtaactagacatggactcaagtcctggctctgtcactaactgactaactgtaaaaaagttacacaacttcttaaagctccagtttcttcatttttggaaataattatactgaatttgccaaaactctgtgagaattagagacaaggtatacaaagtaccttgtaaacaatagccatccgctacgtagccgctattaaagtctgcatccatcattttagatagttactcaattttagtgttttgattttgtaataccttatggtggctatcgctctcagatttgtgttgtgttcagatttcttgaaaatgttttctccatgtttatctgagaaattgttaaaaataaaaataatgaaagcaagatatggccaaggacaggactgagtggtcatgctgacatagatcttttcacatttattaatggctgtctttagataaagttgtaaaattaattcaccttgcaatggccccaaactccccatcttgtttctgaggatacagaggtttttttttcataggtatcctataaaagagttgcttagccagtcaccttgctacgactgcataagatataatcacatcaacttcttaaacatttgtaaacttcttaaacatttgtaaactatttgttttgtggtatgttggctttttgtctcaaacagctgattgttctgtgtattatgaagtactcaaatcatttctgagccattatctttgctcacaggataattctacatcaaaacttctgtcattatgctattatagagttatttttctatcatgatctgattgcctgcttatactatccaccttatttaaaatgcttcattggtcacacaagattttatctatttgtatataaactaaaattcaaaatctacttatggaaaaatatctcctatacccttgatctatgtagatgacaaactcaactcttaggaaagagaagaagggatgataggaattacatctcataatttcattttgaaaaacaaaagttggttggtatcatggaagagacaggaatttcaggagagagtgaccttagctaatatacagataacaaaactgtagaaagacaagagtattaataaggcaaatgtatttgtagaatagcagaaagaaaggattaccttcagaggtaggcttggtataaaaggaagtatctcttcttatgatggacgagctataaagctataaagcctatttcttccaggggtgatacagctggaaatatgcttagattctaaataggtttagatagatttataaatacatcaataatgtaccatcaagggcaggacaggtcataggaacataaatatgatatttttgaggggaactttgggtggcctatcacctcatactcttaagagaagacttatgttggatggttcagcagcttgaccaattttgggacattcctttgttcttataagtgttatcatagtcaaattactcagaggaacaaatagttacaaactccccgaggtcttagatgacaaaattatatatatatatgtatataatatatgtgtgtgtgtgtgtgtgtatgtacgtatatatatgtatgtatatatgtgtatgtgtatatgtatctgtatataagtatatgtatatatgtgtgtgtatatgtatatgtatgtatatatacatatatatgtatgtatacatatgtgtatgtatgtatatagacactgacattactcataattaaaaaacatcttaacatttttgagaaagaggcaaggacttcttttacgctgtatgacgggaactagagaatgttgaaagtcataggtctgaaaatgtttaattacaagtgcgttttctttaaaatctatccttcagttgagatgacagtagctgtcaccacacccctttccctaggtagccaaattaattgggaaaagaaaaaatgtgttcattggagtggagtctcacacactatcacagtgcccttgacagcaccctgttgtggcccctgttccacctatgtgatggcctttcagacatgacaaacagtttttctagtttctttaggtgaaaagatttaactgccaattaacgagacaccctaggtttaaaaaaaagtgaccgtaacttcgtaattttattttcctagcatctgttctattcaagccaagcctactgcggtgatcttcatcaagacaattcaggggtttcctagcaaccaagtttcctgtggtttccttggttatatgtaatgacataactcttatgggcaacttcacaaaaacacagaagaaagccctcctaaagaatgaaattccaaaaaaaatcaggttactgctcactgagtgtctctgtttaaaatggagaaatttatcttcgtgaatgttaatgacactaataaataattatgtagcaattgcaaagtaaaatcacatggttatttgatttctttcattgtttttgttatatgcctgatcttaatttgatttctgaaatcaggatcctttttccatctcttctaattgactgccacatgcttagacatatccagcagatgaaaattagacagttaaaaaaattacatgagaggtcatttattaaaatagcagagttgtagttgctcaagagtaggaaccaataatactgcctgttttttactaataaagtatattatgaggtttgtatggcagtatcaagggttattggtggaggccattaaataactgttaatgtatactgagaagtaaattttccatgccagcatgaccaacattagctacttttatgtacttaattgttttttccttctatattcacaaagacaaattatactgggtaactgtaatctttggtgatatatctaatatccataatatgtcaaccaaagaagaaatataaatttacacaattaagagtaaaatttgtgcaacatcggctattcatccttgcattttcagtgcctatcatacaaggcggcttgtgataaatataaaatattggattaatgaatgaccagggctcaacaactcctttggtttttccagtggaaatcagaatttaatatgaggatccccagattaaagtaatgcacacttagaaaaggagaaaaatataattaatacatcagaaatttttgagttagagtacagtaagtcctcacttgttgttgataggttcttggaaactgtgactttaactgaactgacatactggatagtagaactaattttaccatagtttaattgatacaagcaagagttcagttcctacagcatacagtatatacagtaccttgtttcccttaaagtcacacttttcaagaatctatccgtgaggacttaccatatatattcctctgcatactattcatttattaattaaatatttattatggacctattaggtaccaggttctgtgccaagtgctcagagtacaactgagaacaaaattaaatatgattacagcctcaagaagcttgaaaattcaaaatgtttaggaattataaattagctaaatgataatacaaacaaaagtacaaatactgtaaagacaagatactgtaaacacaagatagattaagccacgagtttaacaaagaaacctcttctgatctgggggtagagtgtccagggatagcttctcaaaggaagtagcatttaagctgagagatgaaggcctaggtaagcataactgggagaaagttgggtgtgggtggggaacagcagagacaaaaggataagcatgtgcaaagactttagaggagcccaaagaagcagagagacctggagttctcatttctgtcagtgggaatgaacctagaatgagaggagatttcagagggtttcaaaaggattcctataggccatgttgagcatttagcagaaacaatctagaaaaagttcggaaatgtggttcatagttacaatttaacctttgtagtattaaatgtatttaaaaaatcacctaagactttgatctgagggtgaaagtttaattctgaagttactgaaatagttgagccccagtaggacagggtttgtggcatgaatagggcattcggacagactgtgctcatggactaggggtcaaaccaaggagaagctgaagtccagcagcagtgtcaattatccaggcaggaagattgaaggcctaaggctcagagcaggcaaaaagcatggtaatggggtggggtggagaaaatagcacttatttaagatgattttattacgtatttgtatatacattatttcatttaattctaaaaaccacatgatgaggtgggtattgctttctccctttttatattaagaaactgagaaatagaaagtgtaaaaagcataccctggatgacatgataccagtgaggctgggattaaaatctaggactttcttgagttctaaaattgtgcttttttttcagtgtaatacattatatttccactcttctgtgcagtaacttgggtcagagtcttgatatcaatatggaccgtatgtcatagctgaccacagccaatgagagaggaagatatttatcccaatcttgctttcctgaggcttctaaccaataagctatactaagcctaacttagttgaagaaaatgccttctttaactttatttaaatagaaccacttatttatgtatttatttatccaagaaactttattaagttatctttaaaatcacatgcttagcaatcattttgaaagtgatgcatttggtatttgacgtattcaattctgcattgagatgaggggaaaaaaagcataacacaacttatgccgctcatatcattaagacaaatatggaaaagtagaagggacccagaaatcatttgggcccttgatgttctttcattcattcaatcaattttttattgaacttctcctatatgccaggcacagttttaggtattctggatattccattgaacaaagtccttgatatcatgggaaatagacaaaaacacataatctaataaattataattcatagtcaggcagcaagaaataatatgaagagaaatggatgagagcattaaaaagtgatcaagtaaggcctccctgaggcagtgaaatctgactagagaccagaaagaagctaaggagtgataaatggaggaagacaattcaaggcagagtgaggagaaatctcaaatactgagacatacagcatgcttggtaggttggagaaatgactgcgcttcagattttctgaaaacttagtgattaatgatttttcaagctaataaactgagtttacaatccttgtataacagaagagactcaaagatctaccatttagtcaaggagctatgcagctgaaactatataaatccaaatctagcctcatttaatatgaacaattgtgttaaaatcaacttcttttctgcattaagatttagtcctttaaagttttcaattagcaatgactgcgcctcagataaacctcattggctatgatattgctactgtgcaaagctgatttagtcctttaaaaactaaaagccactctcttggcttacgaactttgagaatcactttagaattgtttaaggcaaagacacaaactgggttaatttcatagtaaagatggttctctgttgtttgcacagtattttattaattccagaatcatggaacattagaacttaaagtgatatctgaattcatctaaagcaccataatagtagctaacatttatagggccagctggcattctaaatgcttgactcatattagcatattttgtcctcataacctttgcagacataaatattatgcctctgtttttaaatgggggaaactgaggaatataggggttaagtaattttcccaaggtaatacaactattaagcaatgaacctgtgcagtctgactctaaagtctttgcatttaaccattgcatactagacagttggaagaaactgagactgactggttaagtaaaatttccaagatcacacctttggaaagcaaaggtggaatttcagccttgacctgtatgcccttagaatttgagttcttaattactattctgtgctacaagcatcattcatcttggtgaacatctagtttaaactccactttgagaggtaatattattcagtagagtgtacatagactttttgaactagaagagtctttttttaaattcaattatatacttgctattatagcttgcaatcttgagcaaataacttatttaagtctcagtttgcttatctataaaatttgggtagtcatacctgccaaattacattgtagagagaaataaatgatgtattgtgtctaacatagcattgagtatgtatgaggcaattgacatatggcgcaattactgtaattctggagaggaaactaaggtcaaaggaactgtgtcacatagctaatagtggaatacctgggatacaaatcaggttccctgattattatatttcttgccttgaactaaaaaagtactaagtagtgacaagattcacagaaaaataacctgccaatttctccatatgtctgttgttattccaactcagaatctgtgatattaatagccatagccaatttgctgaactcctagtgtgaaccatgctagttctctatgatatatgatgtcatggattgctgtgtaatatcatatgtatcactcttgctttcccaattagatcataacaatcatctcacagggatttgtttcttgtttgattgtttttgtgtttcttctgtatcctcgagcttcaccttcaagtgtgggagaaaaggtcttttatgttaacccacaaatcaactactttaactgcttcttaaatttttaaatattttattttatacttttaatcaatacatgctattgtaaatgtttatgggctacataatgatatttcaatacatataatgtgtattgatgagatcaggataatcagtatatccattatcctcctaacttatcattgctttgtgttaggaacatccaatattctccttctagctatttgaaactgtatattattgttgactatagtcatcctacagtgctatagaacactttgacttatttcccctatctagctataattttgtatcctttaaaaaatctgtgcatatacccttttccttacccttcctagcctctagtatcctctgttctatttttcacttctataagatcaacatttttagcttcctcatatgagtgagaacatgcagtttttaactttctgttcctgggttttttcactgaaactgctttgttgagagatcatttacatgcaataaacagtatcaactttaaatgtacaattctatgagtttcgacaaatgcatacagttgcataacaaccaccacaattatgacatagactactttgtccaaaatggctgccacttgtggctactgatcacttgaaatggggctagtcctaattaaatgcggtataagtaaaaaaaattatatatatatatatatatatatatatatatatactgcatttcaaaggcttagtataaaatttaaatatctcattaataatttatgttgattatatattgaccatatttttatatatcaagtaagtatatttaaattaatcttacttttttacttttaaatatagctagtaaaatattcaaattacatatgtgactggcactatatttctattgggcaatgttttcatagaacattgtgaccacttctaaaaacttattccttgccactttctaaacaatctccttcctgcacctgaactcttggtgatcactgatattccctctgtcactatagttttgccttttttagaacatcaaatagtgtgtagtttttcatatctggtcagcataatgcttctgagagtcatccatgtttttatgaatcagctgtttgttcctttattgttgagtggtatttatcatggatattccataatttatttatgtacttctcagctaatggacatttgggttgtttccagtttttgattcttaatgaagctggcatgaacatgtgagtacaagttttgtatggacatagtttttcatttctactggataaatatatcagaaggggattactggatggcataataagtatacgttcaactttagaagaaactgccaaactgttttccaaagtggttataatactttacatctccactagtaatgtatgggagtttaagttgttccacattttcaacagctttgtattgtcagtcttattaaattttagccattcaagtggatgtctttggtatcacattgtgatggttttcatttatgttttcctttataactaatgatgttgaagatatttgtatgtgtttatttgcctgccattcatatttcttccttggtgaaatgtgtcaatcaaatctgttgcccatttttaaatgttatttgtcttctaattgagttgaaagggtgaagttatttataaacactggatatgatagtttctatttttacatcttcaaatttacttttttttctgcagtgtttaatatcatggcaatacaatgcattgtaatttttcattgcagattttcttctctaaatttccagttggctcttggttatagcctatacttttttcttccattattttatattactctttctctctatcttcttgaacaaatgaaacatttgtagtacttttttaaaaagatccttgtctacaaattctattatatctgttatttttagtcttttaatttgtttatttctctattgtttattgtcctcgtttttctatctttttattaattattggactttttagataatacattgtttgctgctgggtttttttttttttgtattttttaaagtggtgatagattttgttctggcaccattgggatactttttgaatcagtttgatccttctgaagcttacttttaacctttattagaattggcccagagcaccaattagtctagggttactactatggtgataactatataatgattcttgcggatgctccatgtaaacacactgcttggtagaaacatgaattaagactaactctatgtaagctctgacagttgttcagagtcaggttctttcttcagcattgggtagtttcctctcacacaattgcatatcaatcttcagccagactcaaagggatgcctcagcagattctcagagctctatctcagtgcagctccttcatctctggtacttgttcttgcaattatagccatttggccttccataaactctgatctctaccttaactcagaacaaatgccagtctctgtctgggttccccatctctgcactgcagcctagcaactgctttcaggctgtacactggacgttcattgaactcaccctgcttctttaccttttctcaggaatcatgatccatcatttcatagattttctatttcattattccatcatggctggaagcataaggctagatattttaactttgaaataaaatatcatctctgaagcctgcaaaggttacatatgcagcctgagtttttcctttccattgacagttcaaaacatgggcactctgcatgggtcttcaagaggttagttttaaatttttgctccctaggttccaagtaaaacccagttagaaatattaacactttaacattcaagaaagaaagtctaaagactataatgggcgtacctgttgctaaatttgtaaggtttcatttctaaatcaaattagagcattaaaaagcaacttaattggagtacttttctttaactctcccacaaatggctttgctcagctatatttcattattgtgcttttagctttcactaaggccatacaaaaacatcacaccttctggtaacacatgcacacacaaatatagatacagtgagaattgaattaccgtaacacatctccatcacttcctactactaaatgtaattctcagatcctttgttcctggcttggtgaaaatcttgaaaatttttttaaacaatttcatttcattttaagttctgggatacatgtgcagcatgtgcaggtttgttacataggtaaacgtgtgctatggtggtttgctgcacctatcaactcatcacctaggtatggccccagtgtatgttgttcccccgcccccgtgtccatgggttctcatggttcagctccaacttataagtgagaacatgcggtgcttgattttctgttcctgtgttagtttgctgaggataatggcttccagctccatccatgttcctacaaaggacatgatctcattcttttgtatggctgcatagtactccatggtgtatatgtaccacattttctttatccaacctatcattgatgggtatttgggttgattccatgtatttgctattgtgaatagtgcttcagtgaacatatacatgcatgtattgaagtaatacattagtggatgccacttaatgtgtttttggtagttttgactcttatttcaacttcattgttctaattcctttttctttatgtcattttgatttttaatggaagaattacattttaaaacaatgagtgaataaaattgtttttctattttggcaatcctaaacacatagttgatattcagtaaactctgataaaatgaaagtaattgctaatagactaagctagtgaacatatgcaagaaattgattacaagtccatttatctcagtcccaagcacatattgacacctacaatatataaaatgttgaggtgggcgccaaaaaataaactgacagagatgtggtcttgtcatggagcaatcacttatgaatttgattttgtattgattcagtcagaacagattgctttctctgcttgaaatgctgccgcttcctgcaagacaccatactcagataatctctcatgtttcttacttaattcaagcccttcctttaacatcacttcatcaaagaagtcttccctggccatgtttcctaaaatacaattacctgtttatattttattctcttactctgtttgtgtctatatgtatatatacagacacatatatatgtacatttgagacagagtcttgctctgttgcccaggctgaagttctgtggtgggatctcggctcactgcagtctccccctcctgagttcaagcaattctccttcctcagcctcccaagtaactgtgactacaggtgcgcaccaccacgctgactagtttttgtatttttagtagagatggggtttcctcatgttggccaggctggtctcgagctcctgacctcaggtgatcagcccgccttggcctcctaaagtgctgggattacaggtgtgagccactgtgtccagcctgtgttcaaatttttctttcacttctaaccttaatttcaaagtaagatctgtgaggatagggatttgggctgatgtgttcaaacagtatccatgagtcttagaacaatgactagtacatgtaaatgcttaataaatattcacttaatcaataaatgaatttaaaaagtgaatcctctatgattaatctaatcatagatatgtttaagtttagcctgaattgtctgtagcttgccagaatttccactggtagccagctgtgtttgaactcatgaaaaatactttccagcttcactgttgttgtgaggagagtattctatgtgtggaggttaactgcacatccccaaagcaacattattgctgaataaagatgcctaatgcctttactattaattatctgtggctatgctaaactgtaagcttttgagtttttatctttgtattttaatagttaatttgaatagaacccagtaatttttttatttttattttttattatactttaagttctagggtacatgtgcacaacgtgcaggtttgttgcatatgtatacatgtgccatgttggtgtgttgtacccattaactcgtcatttacattaggcatatctcctaatgctatccctccatcctccccccaccccacaacaggccccagtgtgtgatgttccccttccagtgtccaagtgttgtcattgttcaatttccacctatgagtgagaacatgcggtgtttgattttttgtccctgcgatagtttgctgagaatgacggtttccagcttcatccatcttcctagaaaggacataaactcaaccttttttatggctgcatagtattccatggtgtatatgtgccacattttcttaatccagtctatcattgttggacatttgggttggtttcaagtctttgctattgtgaatagtgccacaataaacatacatgtgcatgtgtctttatagcagcatgatttataatcctttgggtatatgtccagtaacgggatggctgggtcaaatggtatttctagttctagatccttgaggcatcaccacactgtcttccacaatggttgaactagtttacagtcccacaaactgtgtaaaagcattcctatctctccacatcctctccagcacctgttgtttcctgactttttaatgatcgccattctaactggtgtgaaatggtatctcactgtagttttgatttgcatttctctgatggccagtgatgatgagcattttttcatgtgtctgttggctgcataaatgtcttcttttgagaagtgtctgttcatatcctttgcccactttttgatggggttgtttgtttttttcttgttaatttgtttgagttcttcgtagattctggatattagccctttgtcagatgagtagattgcaaaaattttctcccattctgtaggttgcctgttcactctgatggtagtttcttttgctgtgcagaagctctttagtttaattagatcccatttgtcaattttggcttttgttgccattgtttttggtgttttagtcatgaagtccttgcccatgcctatgtcctgaatggtattgcctaagttttcttctagagtttttatgcttttagttctaacatttaagtctttaatccatcttgaattaatttttgtataaggtgtaaggaagggatccagtttcagctttctacatatggctatccagttttcccagcaccatttattaaatagggaatcctttccccatttcttgtttttgtcatgtttgccaaagaccagttgtttgtagatgtgtggtactatttctgaggcctctattccgttccattggtctatatctctataatctaagatcttttagagttttttgggtttgtttttgtttttaagaagaagatttctgcatcatacaaatattctcctttaaatatggaatttcatcatcgtgttttcggggagaatggatgtgtatacctaaatattctttattttgaaatgtgatgaaaatgtaactagtaccagacagactgaattctgtaaatcagaatttattattctagcagcacatgggaaatattgaaattcattttgctgtaagtatagctggtgaagtgagcagtattgttggtttagagatgttgatgttttggaaagttgccattaaggccttttaatcttacattttggacttatgagaaaaatccccggggctattctaaaatcctaacagatgccttctgctaaaatgcgtacaaaatatatctctttttctatattagactttcatatttatttaatacaggaaacaaatatcttttgtattagaaaaaaacacaaatataagggatctgcaagatcctttagatctacttcttcaatttccagttgaaaagactgagactcactttcttgagtcagtacaggactttatcaatgacaggaaattaataacaggcagttctagaaagcagaaacctactattcaaattactaatatgccaaggtttcaaatagtttagttattgtgccttaaatattgttacaatagtattattttcccattacaggtatgtataccagagaataaaccacagtctacttctaaggaaattaattatataaaaggaaggatcctatggttctttatgaaaacagtatttttttataaaactgatcaattaaagctcattattagcactgaagtagaattactttttctccctaggagaactgagttgtaggaatgctttgtaaatgtgtttttaaattgttgattttatttagaattggcatcttttgctaaagaatcactatgagtcttcaccgaaaggttgaaatgagttgttgctattgttgagcattgtggggtaagagaaatcctgcctcacgcaaatttatttacattgcttcatccctctctgtatcttcaggaagttcaaggacctgcaataaaactgatgctgaatgtatttctccaaagagttggaactttacaatatttgtccttttcctttcttcagatttctttttcttatcctgcttcctattatatgtcttaatcttttgatatgaggccagcatatgtgccattgaaaatggtcttagagtttctcttttagtgaaattgaatattctcccatacatattaatagtgatatggtttagacaataatttagcatgataaagctctagaagcagccttggcttttctagtgaacatcatggcaatccttttaaacttattggtttagtatggtataaaactcacaggtaaaaaagaaagcaaataaatacaaatagataaataaggtatttccatagcattcagttggtgtgacaatcattatacacaaaaatttgctctagagatttccccctgtgcaatctgttggaacttcttgggcttccatgtggtctctgaatgaaattcacttttcattacaaaaatctttttatactgaatcatatgctccattactttctaggaaatgggaaatcattgcccactgtattgcacaaaaacataccaactacctacaaatgaaattaagatcgagaggcattatttttttattatttctttattttattattattatactttaagttttaggttacatgtgcacaatgtgcaggttagttacatatgtatacatgagccatgctggtgtgctgcacccattaactcgtcatttagcattaggtatatctcctaaagctatccctcctccctccccccaccctccaacagtccccagagtgtgatgttccccttcctgtgtccatgcgttctcgttgttcaattcccacctatgagtgagaatatatggtgtttggttttttgttcttgcgatagtttactgagaatgatgatttccaatttcatccatgtccctgcaaaggacatgaactcaaccttttttatggctgcatagtattccatggtgtatatgtgccacattttcttaatccagtctatcattgttggacatttgggttggttccaagtctttgctattgtgaatagtgccgcaataaacatacgtgtgcatgtgtctttatagcagcatgatttatagtcctttgggtatatacccagtaatgggatggctgggtcaaatggtatttctagttctagatccctgaggaatcgccacactgacttccacaatggttgaactagtttacagtcccaccaacagtgtaaaagtgttcctacttctccacatcctctccagcacctgttgtttcctgactttttaatgattgccattctaactggtgtgagatggtatctcattgtggttttgatttgcatttctctgatagccagtgatggtgagcattttttcatgtgttttttggctgcataaatgtcttcttttgagaagtgtctgttcatgtccttcgcccactttttgatggggttgtttgtttttttcttgtacatttgtttgagttcattgtagattctggatattagccctttgtcagatgagtaggttgcgaaaattttctcccattttgtaggttgcctgttcactctgatggtagtttcttttgctgtgcagaagctctttagtttaattagatcccatttgtcaattttggcttttgttgccattgcttttggtgttttagacatgaagtccttgcccatgcctgtgttctgaatggtaatgcctaggttttcttctaggatttttatggttttaggtctaacgtttatgtctttaatccatcttgaattaatttttgtataagatataaggaagggatccagtttcagctttctacatatggctagccagttttcccagcaccatttattaaatagggaatcctttccccatttcttgtttttgtcatgtttgtcaaagatcagatagttgtagatatgtggcatcatttctgagggctctgttctattccattgatctatatctctgttttggtaccagtaccatgctattttggttactgtagccttgtagtatagtttgaagtcaggtagcgtgatgcctccagctttgttcttttggcttaggattgacttggcgatgcgggctcttttttggttccatatgaactttaaagtagttttttccaattctgtggagaaagtcattggtaacttgatggggatggcattgaatctataaattaccttgggcagtatagccattttcatgatgctgattcttcctacccatgagcatggaatgttgttccatttgttggtatcctcttttatttccttgagcagtggtttgtagttctccttgaagaagtccttcacgtcccttgtaagttggattcctaggtattttattctcgttgaagcaattgtgaatgggagttcactcatgattggctctctgtttgtctgttattggtgtataagaatgcttgtgatttttgtacattgattttgtatcctgagactttgctgaagttgcttatcagcttaaggagattttgggctgagacaatggggttttctagatatagaatcatgtcatctgcaaacaggtacaatttgacttcctcttttcctaattgaataccctttatttccttctcctgcctaattgccctggccagcacttccaacactatgttgaataggagtggtgagagagggcatccctgtcttgtgccagttttcaaagggaatgcttccagtttgtgcccattcagtatgatattggctgtgggtttgtcatagatagctcttattattttgagatacatcccatcaatacctaatttattgagagtttttagcatgaagcattgttgaattttgtcaaaggccttttctgcatctattgagataatcgtggtttttgtctttggttctgtttatatgctggattacatttattgatttgtgtatattgaaccagccttgcatcccagggatgaagcccacttgatcatggtggataagctttttgatgtgctgctggatttggtttgccagtattttattgaggatttttgcatcaatgttcatcaaggatattggtctaaatttctcttttttagttgtgtctctgccaggctttggtatcaggatgatgctggcctcataaaatgagttagggaggattccctctttttctactgatttgaatagtttcagaaggaatcataccagttccaccttgtacctctggtagaattcggctgtgaatccatctggtcctggactctttttggttggtaagctattgattattgccacaatttcagagcctgttattggtgtattcagagattcaacttcttcctggtttggtcttgggagggcgtatgtgttgagaaatttatccatttcttctagattttctagtttatttgcatagaggtgtttgtagtattctctgatggtagtttgtatttctgtgggatcggtggtgatatcccctttatcattttttattgcatctatttgattcttctctcttttcttctttattagtcttgctagcattctgtcaattttgttgatcctttcaaaaaaccagctccgggattcattaattttttgaagggttttttgtgtctctatttccttcagttctgctctgattttagttatttcttgccttctgctagctttgaatgtgtttgctcttgcttttctagttcttttaattgtgatgttagggtgtcaattttggatctttcctgctttctcttgtgggcatttagtgctataaattttcctctacacacggctttgaatgtgtcccagagattctggtatgttgtgtctttgttctcgttggtttcaaagaacatctgtatttctgccttcattttgttatgtacccagtagtcattcaggagcagtttgttcagtttccatgtagttgagcggttttgagtgagtttcttaatcctgaattctagtctgattgcactgtggtctgagagacagtttgttataatttctgatctttcattcattattttcagtgcacacctgaattgagaaaagcacattaatgaacttgggttgttgatgtcaacccattttcctgtatttattaaaaattatcatgtattctgagcttaaaaattgttttgatttcttcacttaaaaaaggttttcagctgttcacataatttaggaaacagcaaaacaaaacaaacaaaaaaaaaaacctgccttcccatgagactttcatggtaagtccacctggatgaccaaaaatactttttatttgttagcattcttgctgcagaaataacatattgttatgcagatatattcacttcaaggcaaaacaccaaattattttctagtgtttttccctttaggagctttcatgattctaaacctttcatgagatagataaagtaagtctttctgaagattggatactgtaaaatccaaaactattctaagccaccaggtgaatatgatcaatctgagttgtgtaagcctcaactcaagacaataaaagctgtttgtagccttattgatgccaagtatatgtcaatataaaacaacagcaacaacaaatctcaaaacattgtgatgaaattagacttaagatatttaatttggatttttaaaaaaagatacacatttatttttttaaataattaaattgataaaaattatacatatttatggtacacagcatgatgttttgatatatgtatccattacctcacatacttatttctttgtagtgagaatatttaaagtctactctcttagcaattttcaagtacacaatacattgttattaaagagtcatcaggctgtgcaatagatctcctgaagttatacctcctgtttaactgaaattttgtaagcctttcaccagggtcttcccaatccctgtcacctgcccaccccagtccctggtagccatcattatactttctgcttctttgagtttgatttcttttttttagattcatccacttggattaaaaactaaaacataagacctgagactgtgaaactactagaagaaaacataggggaaaagcttcttgataatgggcaaagattttctggatatgatccaaaaagcacaggaaacaaatgcaaaattagacaaatgctattgcatcacactaaaaagcttctgcacagcaaaggaaacaatcaacagagtgaagagacaacctatggaatgggagaaaatatttgcaaaccacacatctaataagggataatatccaaaatacataaggaactgaaacaactcaatagcaagaaaacaatccaattttttaaatgggcaaaggacttgaaaagacatacgaatggccaacaggttcatgaaaaatgttcaatgtcactactaatcatcagggaaaggcacgttcatttcagtatcttttattaatgacattatggtatctatatatatctgttagtattgatttttaattatagcatccaaaatattcagtttctgcttacaaagctgttttaagttattttgattcaactgactcatcaaatcaaacaaatgatttgatatcattttccaatgaaattaaatttcttaatttctgtttttgactgaatgcagataaaactcttggtcatacagaaagtctgttcccacaccattgccctcattccattatatgcattttctactcaatgtcttcactgtagtattgatggtggatggagagataaagtctgcattaactgaaacaagttatttgaatatcccttgctaatcagtaaggtaattaatgcattgtaactaggatgtagagcctgtgaaaccctgttgtataatgccatggtacagacatatctaaaatagaccaacagatgttttgagaaacttcttaaaattttctttgcttctttggagtttctttaccaaattataagtaagaatacaaatgtagttggtgatgatgagataattctttgagcaaaacaatagagctgtagatgaggttaaaaagttcatattaatattgtcaagaattttttcatatagaagtaattttatttttcagatttttgaaagctggagagatgaggatgggggaatgaaggagcagtaaggtttgcccaattgatgacacatttatgtataattttttcatgctttggaaaacaatttaaaaaaaaattgttccaagaagttttaagcacattatagatatgaattaactgcatagtattagtttaaaaattattagagcatttgttaatttcatatatgacagcattagataatactaagttctaatcttttgatttttctagctcatagccctattctgggtctccttttcaagttttttaatatattcataatttaatacattaccttttaaatattattttattttagatttaggggatacatgtatatgtttgttacatggatatattgagtattggtagtgattggacttctaatgtacccatcacccaaatagtgaacattgtgctcaataggttatttttcaaccctcacccttttcctctcattagtaatttttttgcagtaggtatttttgttaggctatcagacgttgaattagtggaactcttcttaaaatgacccataggtgactcagttcatttctgtgcagtactcttaaaatagagatttttctgactttctagttgagaaagatcatgtaattaattgtcaaaacttttaaatcaaaatgctagccttaatataaatttccaacactgcagtggagtcagggtaccatataaacctgattactgtggcaaaaagcttgaagctttcataaatgcagaacaatgctggtaaagaggaacctgattttaaaattattgcttaaacctaggttttcaataaagagcggaaattgatgagcgtttgagggaataataaccaatggttacagtcaaaatggtaacttctgtgacatttctaagtatgcaagtgtgagatggaagtatttggagggactgagagctcttcactacctctaatttaggcagctttcactagattgggagagttccaatatatatacctagttgcaggtgtccatccttgaagaaagtgaaaaaggtcaatgaatgaacagattccacaagtcttgtctgctactaaaccaactggtcagtgttgttgtggaaataatgtgtgaaaagcatagagcacaggtcctggcacatagtaaataccaaatacatggtggatattactaaaggaggtagcaatgcttattagctaaaagcatagattctgaaatttaaccatctgtgtttttgtcttgcttccacaataacagctgggtaaacttgggaatgttatttaacttctctgaggcttgtgagataaaaatagtactacctcatatggttgtcaaggaaataaacgagaatatatataatgcgattaaaccaactcctagtatgtagtaagcactcaatgtaaatatcagttatttctactacaactgcaactatgatgagggtgatgactatgactgctatcaccactgccttctgcaactactgctgtctggcctatcttattaggaattggctgggagcttgtagaaaagctttggaaaagcagaattggataagtcaggacctgactaatctgaccaatttgggcagagctgaagcttactttgtaacgccctggaagcaaatatggaaaaacagattatcatgaggattaaactatctgataaaacaaaacacttttagcaagattatcaaattatttataagtaaatcatgaaatggtgctattttaatcacagatttaaggcacaccaaattcttaccccacatgaaaagacctgaaccccaagatttaagaaaaaacttatatacactttaaaataattttctaacagttattttgtgtgctgcaaaagaactgacatattttcttattgtgtaaaatatatataacaaaatttattgctttaaacatttttaaagagtttggtgacattaagtacattaacactgttgggcacccatcatgaccatccatctccagaatattttcatttttccaaactgaaactctttacccattaaacaataattccacatttccagctgccttaagttcctggcaaccaccattctacgttttgtctctacacacttggctattctagacactgaatataagtagactcatagaatattgtccttttgtgtttggcttatttcccttggcatagtatcttcaagcttcatctatgttgtagcatgcattagaattttattgttttttaaggccaaatagtatatttcattgtatgtatatgccacattttgtttaatccattcatccgttggtaaacatttgagaagaaaggcactgtcctcaacttgatttcagctttctcactggccatggatctatcagtgatacgttctataagatccatctattttggcctgatttgtagttgattaggagtcatacttctttagattaggtatttttgtcttgtctggttatggtttcttaccaaaaataaacaatgccagggttcactataatcattgtttcttaataatgaagcaactaaatggtaccaggttctttggcaagactaaatgttttatattggaaacccacaatttatgaatctaaatgaatctggagctctgacattttagaacctttgcattttgttcaaggatgaagatgaacaaaattaccaaagagcaatgtatataaaaagttgattaatttatatacattgagtacttgttacaggcaaagaatctcccgaggtgctgggaggattataaaaaaactgtaactaactgagtcaggcttatgaccttacattaatttttggagaacaggaagacatccctgaaaaataaaagtactaataaaaaggtaaattttttttctaactcttccaaatttaatgttcttgtattgcttgcttttgtacttttcatttagatcatttattacaatttataatttatatatttggagaaattattgattgaatgtctgcctcaccccagactataatgaggacagaattgaggtcacgtctctaccagtgtgactaggaacattggtaaatgaccattgaattaattagttaagtaaccacatgagcacaaatataaaatttaagtcatgggtcagtagccgaaagaagataaggaaagatttactgattgtctacaatgagccagctgctttacaaaggtacagatgacaattacaggctaggcagtgagaacatatctaactctgcaggaccctctgccattgatgctgcctgactgttacacagattgagtctctctttatctcccttgtcacttgtgttttcctgtgtcacctgtgttttccttctgtgcctctatcattattgcctcaacaccttatcatatttaataattttaaattgtttttcagtttaccaatggcttcatgtccatccatcagcaaatcatcatagcaactctccactttacaaaggaggaaacagactcagagaaatgtgatgactatcccaagataccacaaaagtaaatacagaacaaaacttaaaactgggtcttccacttccaaagctagtgctgccccaagcgatgggattatattgcactttgtagtgactgtgacagcttttaaagtgaccaagtttctttttggttccttttctctcttggtgtagagtttttgagacacaattgcatttagaattctcaagtactgaaaggtgcttttccccatggatttgaatcaagtgtgcgaattgcatccaaaaaggttaatctgtttacccaactagaacattttgcactgcagaaataaaactagaagttgcattgctgggctgctccagatgtcctgtgctttgagctgctttatttgcatttggtatttcaaagcttgtgatcaatttacaattataattgtcaccaaaattttactttaactagcactttgggaaggaaaacatcaatttacattattttgcagagtttgaaaatatctaatgatttataaaacaaaaatgggtttcatcaagacaagtgagtacaaaattgctgttgctgatctatgttgtaatcatttcctaatacaagatcttgttattttcatacatgcattttgtattcactatgctagtccataataagataattttaatcactgagttatacagctgctctaagagagtgaagagcataaacatgaataagaaaatcagacagctgattataaaaatgtattattggatatctgtcttggcggcacatgtaactagattaacagtgagcatgattccatatgtaaggtgtttcttacttttcatatctcctttaagatatgcaaagatatatttactttatatactatcaatagaattcttgtcagtggagttagaggaattcctagaaatagctcagtttctttaaactataatactaccagaaagaaaagacgtcataaattatgtatcaaatatattgttttgagagtcaatagataatagcaaacatttattaagtgcttaccttaagctaggctctgtgctaagaacattatgtgcataaggtcatttaatcatttgagagtaagcacttctactattacgaattgctatggcctgaatgttcgtgtctccctaaaattcacatgttgaaaacctaattaccagtgtgatggtattaaggggtgaggcctttgggaagttattagatcatgagggcagagctctcataaatgggattcatgtccttataaaagaggcccgagagagttgccatggcccttccacgatgtgaggacacaacaaggaggcgctgtctatgaaccagaaagcaggccctcaccagaaaccaaattagccagcaccttgatctcggacttcacaacctccagaaccctgagaaatgaatttctactgtttatgagctactcagatgatagtattttgtcatagttacctgaacagactaagacatgaattctatctcaaagatgaggaaactaaagttgaaagtggttaagtttctgaaggttctgcagccagcaagagatatataaagtaccaaataataaaataaattttcaaataaaagtcaaatccaagaaaaggcagaaaatactaattcttagttcagaattttattattagtctgaaaaaataacgtaacttatatgcaaattatacaagcttagaataaaaagaaaccccttaaagactctctgaaaacacagactatgtcttacttattttttcatctccttgcatacagtagcccacaatttttttttttttttttttttgagacggagtctggctgtgacacccaggctggagtgcaatggcacaatctcggctcactgcaacctctgcttcctgggttcaagcgattctcctgcctcagcctcccgggtagctgggactacaggcacacatcaccacacctggctgatttttgtacttttagtagagacaagagatcaccatagtggccaggccggtctcgaactcctgacctcaagtgatccacctgcctcagcctcctaaagtactgggattacaggggtgagccaccacacccagtcatataaaaaatatggagttgaattttatccagtgtcagaaccttccaaaattggggagtttacaatccaatttattcttgagaagttccaggtatcaaaaaattcttttatcttttaagtaataatgtttctctccataatttccctttgttgaaattgtgtgatcatggagcctaaatgaccattggtaatataatattaatattcaaaatggatgatgcaattcatactgacctgtcagcagcccaatattaatttaaactactgacctacattaatttacctcagagcaatggttctcttttcttgcttactttcgggtcaacttcaaacacaccaatgccccgttttcacgacagataaattggtctgcatatctggagttgatctgaacataagcattttttaacaactccccagatagttctaatgtgcagccaatattgagactcactatgatagagaaatgcacactaaatacagagggttgttgccaagcaaggaactacctggctgcccagccaagacaatccagaatagcattatttttatgaattcatcaagcatttgggtccagaatttgatcttaaccttgcataaaagttaatcagaccctaggaaattgataatatgttaatcaaacatgaaattgtctcatatagaatatagaatgccagactatgggggcgtcccagtaggcacattcgctgtctgaaaacttgttcctctttttcaattagttgtgtggacaaatttctcagatcattgcactgaagagctagaatctgagtggaaatagttgatagtgttggtatattttgctgaagatgtgaagaatcttgataaaatggccttgttttgatgataatgctcttttgtttaaattctgatgtcctatagattcaaggtcctctggatattctaaattaatattgccaagttaacttatttgactcctgtttttctatgactttgtacgtaatcctccttctttctttatatataatactttatcttacagttttagcattggcaacattctatttcttttatatttcttgattgtattagtgaaattctagcactccttaagcatggtttacagaatgcttatccaatgtgtggaagacagaaaccttagagggttagaacaaacattagaagagcagttcgttcttaacctacttttctgctgagatgctcattaaagttgatgttcacttgcatgggcatgcccggattttgaaaaccttgtcaaattatctctatttctgggttttttttttatctgggtctctctcatgttttaggctttcctcaaatgtctgatgattcttgattgtctgtttatatttaggaaagggtccattaaaaagctggtttggacctctgtgttcaagggtagtcctagctttagcataatgagacagagaaagcagacagggcattcaactaggtactttgtgctgggctcccttcctccccccaactcccaccacacacatcctggaaggcagcaatgcttctgtttcatcatacagcatagtcacatcctttagaattcttccaatttttttgcctcaagattggactgagggtgtcaacatccggaggtcagtataaagacccccccagcccaccaccccatgcaagatcttgctctgtcacctatgctggagtggcagttgcacaatcacagctcactgcagcctcaaccttcttggctcaagctatcctcccacctcagcctactgagtacctgggattacaggcatgtgccaccacacccggctgatctttgtatttttttgtagagatggggttttgccatgttgcccaggctggtctccagctcctgggctcaagcaatcctccatcctcggcctcccaaattgctaggattacgtgggtgagccaccgcacctggcatatataaagacttctagacaagggttcattctggttcccttttcagctacagccccaggatgtcacctggctgagtccatctctgcccgccctcattatttgccacccctccaatccagctttggtcttccaaagtgccggtgactgccccataccctctcttgatcattgtgtattgattgctttctcaaaaattccattttttattttttaaatatctaatgaggagaaggagacaattacctgtggataaaagaaaaacagacattcaggaaaattattgaatgtggactgcagcataggtaagtaggttgtagattattcacaattccattggctcaagctatattccatcactttgttttctcaagaaaagtcttactagttgccagaaaaaaaaagttgatgatcttacagagattttcttaaatcgaattcatgggccaagatacttgagtgttaccgagaaattacttcccaccctcttcacaactgtttataagtgaacactctgttgtgtcactgatttaaaagtgtcattaaaagaattgggagtccagaagaccttcacaagccataattatagaaattatctgggaaggtaacttttaatactggtggatataatattatgcttgagtgcagttggaagagatgtggtagaaacagacacagattttacctaggttttttttttctaagtttccagggccacagttatttctaaagtatttttgtatgttcctcataatacccagcatatagctttatccatagtgagtactcaatttttcattgataaagtgaggtagtttctgggatcctggcagtccacggacttataaaatattagagctgagtggaatttatcagcccatctgagttttctttggttctggtacatttttcttttctatatgtcattattacttaaaaagaggatgcatatgaaaatggatatgtacagataagatgtgattgcttctttttcttaaaaaaccaaaccctaaggaatcgccacactgacttccacaatggttgaactagtttacagtcccaccaacagtgtaaaagtgttcctatttctccacatcctctctagcacctgtggtttcctgactttttaatgatcaccattctaattggtgtgagatggtatctcattgtgattttgatttgcatttctctgatggccagtgatgatgagcattttttcatgtgtcttttggctgcataaatgtcttattttgagaagtgtctgttcatatccttcacccacttgttgatggggttgtttgtttttttcttgtaatctagaactagaaataccatttgacccagccatcccattactgggtatatgcccaaaggattataaatcatgctgttataaagacacacgcacacatatgtttattgcggcactattcacaatagcaaagacttggaaccaacccaaatgtccaacaatgatagactgaattaagaaaatgtggcacatatacaccatggaatactatgcagccataaaaaaggatgagttcatgtcctttgtagggacatggataaagctggaaaccatcattctcagcaaactattgcaaggacaaaaaaccaaacaccgcatgttctcactcataggtgggaattgaacaatgagaacacttggacacaggaaggggaacatcacacagcctgttgtggggtggggggaagggggagggatagcattaggagatatacctaatgtaaatgatgagttaatgggtgcagcacaccaacatggtacatgtatacatatgtaacaaacctgcatgttgtgcacatgtaccctaaaacttaaaatataattaaaaaaaaaccaaaccctattatttcattgacagattgtcttagagttgatagcatttaataattgagtaagtacagtccttccttgttcctaacgtgccctattttttctttcttctctacttttgcatatgcattttccctctttcttgtttcttggtgaattcctaaaccttttttttcaaaatcacctcaaatgttaccgctttgaagaagccttcctggattctcacaggaacagctaatgtcatctcttttaacatatccccttcttcatctctatgtatactgttcttcaatttcattttataagtagcaaaattcatccagagagatgaaggagcatttacaaggttaaacatcagaagagccttagagatccagaggaatctatttcagatccatgtaatctccatgtggccagctgggccatgtggcctagtctcgattttggttgaatttcaaaggtgttttatgaagaaataggggagtaaagaggtcagaagttcattttgagagatgctttcggaagacctctttaccacgtaatttgtgtattcggtggtgtgttttccactgtgattttggccagggtgcagctgtactgagacattcgttacattgagtcttgtagaatcaggtagggcctgaccttttaagaccattattatggagtagaacacagagaagctgcctctgcagctggcaacatgtatgggtaatggagcgtatcttcagactgtagagagaaaagaagtgcgtgtattcacttcccaggagaaataatattgtctagcattctctataaaccaaaatacaaaagcagtcctgtgttataggactctgcccataactgatgttattgccacaattcccagttctgttttctgggcacaagcttctgctgggatttccaattagcagagggagctctgcaagagttttggattgtggacattgtcactgttctgggttaaattgtgtttcccccaaaagatgttgaagtcctaactcccagtgaatgttaccttattcagaaataagggtctttgcagataatcaagttaagatgaagtaattagagtgggccctaatctaatatgactggtatcttttaaaaaagagagaatttggaccttgggacagatatactcagagggaagacaacatgaagacacaatgagaatgccatctacaagccatggaatctctgaggtgaggctaccagaagcttagagagaggcatggaacaaagattttcccatatatccctcagaggggatgaatcctgctgacaccttgatttcagacttctaacctccacaactgtgagacaatatatttatgttgtttaagctactcagtttgtagtacttttttacaacagccttcggaaacgaatacagtcactaatttgctttcatctctgtgtcacctctccaaatgtcagctccttgtttccaaaatgagggaactagataacatgatctccagctctaaacttccctgatctttctagaagtttgataagctggttctgcagctgtgcctctcttcccacttcgtctttgattccttgacctagacccttggtttggatggggtatgcctaggagtagctcacccttctctgatctcctgggggaatttaattgaagtacattctcctcctgcccagtagtgatgtcaagaattagaggaaagacgtgctgtgtctcatacatcatggatctctgactccttctttccatcatatctcctgaaagtttcaggccagatattttacattagagatcacaacttggactcagtacacaaatgggttttatttgcctgtaccattttttaattttttaattaaaaaaattatttgccaggatgaaaattctaaggtttcacatcaaaatctgaatttctgacatagcaggccaggattcccacacaataacaatgactatttccagctcagttctgttgaaaggtggttgcctttgaaaaagtctgcactctctattttgcactgcctctacccctctctatttttccttcaccagctccaattctggcttctctcatgaatgctatctccatgggtcccacaggcatttgagtttgggacctctgtggacattatgatgagaactatttatttccctactattttatctgggagtacagaatttaagtcattttatatgtctcacatgttatatcagagtacattatatatctacaaatgtatatgccctttaatgattatgcatgtgtccccatagtgtcatgtacattgtggacactaaacaggtatgtattttaaatgtttttgtccactctctaaaaaccaatcttttggtaccatgaggtccttaaggatagaccagaaaatagtgctgcctcagggggttactatcctctctgaggaagtaagatatggagtcaggcaggtaaaggatcaagaagaaagtgaaaagtgcgaagacaaatgcaggcatagcatgaggataattcaggggaaggaatgagcacttctgagtggggccatcaggaattttgcagtggtaatgggggacattttagctgagacttggaaaaatggtagaatttgctccaacatgaggaaatatgagcattgagtaggcaggtatgggggcaattttgaaaacaaatagttcagtttgactgaactaagggaaatcgtgggaaatgagccagaggggataatttagaactatctaaccatggcatcaacatcaggtgtaaggagtttagacagcactgagttattaagctcctggaggagctatatttattctttgtccgtgagtaagaactagacaagaaagatgtgccttgcctctgttgttccaaaaggaaaatggccatttatgtttgcatctactctgagtttcgaggtagaaaatcttcctttttaattttcttcattcttgtatgagtagcaatttttagggaaagcagccgaatacagttcttggcagtatgttctaaaatagcaacacagcatccttatctctgctataacttcgtatcctccagctttctaacaggagcatattggcatctttcacagaattatgctcaacaacttattagctgttcattgagaaaacttatttgtcattttgaaacttgagtcaggtaaaacattttctttcacattttttctttctccttttcaccctctcaactttctctacttctttctgtctcatatctctcattgtctccttccgtccctgtctttcttccttcctcctttttcttcctttcctccttctgtccttcctttctcctttctccctcactgcttccttctcatctttataataaagcagttaagagcaacaactttgaagtcacatggccgaggctataatcctaggctactgactgattgtagaaccctgaaatagctacttagcttctttgagcgtccatttttccatctgcaaaatgggatcatgataataactactgcataagaatattgagaatattcatgtgttaacacatgcaaaacactcagaccatgtgccagggacatgttaagtgctcagtaagtgttgtctatttttattgttattatatctgctgatttttttcacatttatcctcactgagtttgggttcttttaaaattgtgtagaaaaatacattataattgttctttgtttaattttagacccaagagatatattttgatattaaaaagattttttgttattgtggaataacatatagaatccacaacctagatccatataatttgttaaatgtattattggactatgactgattaagtgggttaattttatacatgtaaccgtaagatcacttttagaagactatggccatattgtagatgccttcttctatttgctgattgagatagaggaacatgacatattttatgtataaggagtcagaggatcttgagtttctttaggatttttttctttctcttcttttctttttttttttttttttttgagacagagttttcctcctgttgcccaggctggagtacagtggtgagatcttggctcactgcaacctctgcttcccggattcaagtgattctcttgcctcagcctcccaagtagctgggattacaggtgcctgccaccacgcctggctaatttttgtatttttagtagagatggggtttcaccgcattggccaggctcgtcttgaactcctgacctcaggggatctgtctgcctcagcctcccaaagtgctgggattacagatgtgagccaccatgcctggccaggattttttttcaagagctctatattttgaccatttatctgtttctcttttctttttcctttattgggtgcttccagtctatcatattttgacatttgaaaagatcagtatttttccacacgctagtaagcatattttacttgaaataggtaggcccatgaaattttgattcctttttttgaagacaatgattttaacaagagaaaatggcttgctttatgtcttttctaataactgagttcaacgtgtatgataagtgagattctaacagttttggcaaaagtgcacaaatgtaactttcttgacagcattttgaatgttatccctccacagtagcttttatgtctgtccaacttgctttctaagacacttactttcatcggcactttcagatttttgaattatactttctcaatttgatttttcaagtgagttattaggatataggtgggagtggagaatgcctgcctgcctttcttcctttgtcattccctctctcctttctccctcctcccctccctccttttctccctctctccctccctccttccctccctctcttattcttttatttgtcttttttttttaaaggctttaatgttattctgcttctgttaagctggcaaatattgcccttaaataatcatcacagacactttcacccttcttaccctcaattcatcaaataaaaacaaattaattatggttagatgcatctactaaattgtgagtgcctttaggccaagagcagatgcttttcaaaatacgtagaagaatgaatttactcacagtacttgtgatcattaaatcccttagcctaccagtggcttttttacttgacttgtacactgggttaaaggctcttgctctccctgtctacttccataggttatcatatgacaataatgataataacaatacataacttttgttcagctcatgaaagtttttaaaatgttcccatatacaaagtgattaatgagaaagctctttagaaatacaaaaagcaaagcaaatgcaaggtattgttttcattagcaagtttaaagaaaacttctgcactgaaatgtctgtgtggtgccattaagcatttaattttatttctcaggttatggatttgtctcatgagaggcgatgtgcttaagaacatcagtttgagtgaagcaggactggcataatgcataaatgtacttccagggaagtcgggaagacaccaaaaaatgtgcttactgttgccatagcttgaaatggaaaatgatcattttcctttgttagttctgaagagctagcagattgacagtaatacgaaacaggatctaattttacactgatgcaaattagataaaatataaaaattctggttctagaaagaacacaagtacttgcttataaattattcaattggacactttgaaaagagtctgcagtgctcctatttcggcaacatccaagtagatgttagaatgacggaatgtgttatttttgaaagtgactttatggatcatctaatcagttgatttgatggggaaactgaaacacataaaggcaaaatacttttgctatgaccatgtgactttttaatggctgaactagactctttcaatatatcatcccccatattttgcctataatatttcaaattctcactagatagagctcactgaaggtaggtacagcaggtcctctagtaatgcagttttgttcaatgttgtttcctcataacatcaatgaggggaaaaaaaaagttaattcctggctcaagccactgtctgggtgcaatttacgttctccttgtgtttgcgtgggttttctcccagtactccagtttcctcccacatcccaaagatatgctccttaagtgaattggcttctgtaagtggtcctagcctgaacgagctgtgtgtgtgtatgcgtgtgtgtgtgtgtgtgtgtgtgtgccctgcgatggaatggcagcctgtccagggctggttctcaccttgcaccctgagctgccaggatagactctggtcatctgtgtgcttgaagtggcataattaccttactatttttttttttttgagacggagtctcaatctagtccatactgatatttctttcctatatctctaaatgcttggactagtcattttgcaattcatgatggcccatactattccttttttttttttttttgagatggagtctcactctgtcgccaaggctggaatgcagtggcgtgatcctggctcactgaaacttctgtctcctaggttcaagcgattctcctgcctcagcctcccgagtagatgggattacaagtgccagccaccatgcccagctagtttttgtatttttagtagagatggggtttcaccatgttggtcaggctggtctcaaacacctgacatcatgatccacctgtctcggccttccaaagtgctgggattacaggcgtgagccaccacgccctgccccttacttgttttaattactttttctgaaatgtatgtatatatagttcacatttatttcaatgcttaatatgagaagtgttttgggctttatttagaaatttggtgatgttttggacactgtaggaacttcactcttgtttacatcaattagcctatggtaaaattggtttccttatctgggatttcgcttaaagttgcagtttccaagaacctattgatgacattaagtgaggacttactgtagtcatgaatccattaattcatccattcacccattcatccacccatcagtcaaaaatttgttgaacattaattttaagccacatatattaacattgtgcttttgtgttgttttgtttttgagatggagtttcgctcttgttgcccaggctggagtgcaatggcgtgttctcgactcactgcaacttctgcttcccaggttcaagcgattctcctgcttcagcctcctgagtagctgaaattacaggcatgcaccaccacactaggttaattttgtatttttagtggagatggggtttcaccatgttggccaggctggtctcgaactcctgacctcaggtgatccacccacctcggcctcccaaagtgttgggattacaggcgtgagccactgcgcccacccaacattgtattgttaagtgataaaagttcagggataaataagatgaggtggctgatctcaaggagcttatagtcttagtcactaagggacaataaaaaggagtgaattaattactctgcagagtaagtcagagaaatattttgaaaagagatatttgagttggaacatgaacacaaaggtcagttcctaactaacaaaataatcaagatgataactttctactaagcttctgatattactaatatgaaatacaaataaattatttcagaggtagaagctttcactatagtatttactctatgtacccccctacacatttttaaactttaaacttcttggtccatgatgccattaactcatcccagccctgccttattaagatgaaagctttgacctaaaatatatatgtttcagaaaacctagaacaaaaagtaaaatgataatttattttcaaaccaaaccaacaaacagaactgtccttaaagcttctccttttagaagagtttcagttaataaataaatgtagaaggaattagagaaatacaaagttgccattagaacccaggagtaataatagttgcaggcaagatccaccagtgaatgataaaattattggtgaaagtttgagaaatgacagatatgtctatagtgataaagtgtttatttcaagatatttttaattacaaaagcaaaaatactaattttgtaatggagacaccaagcagattccaccttaacaaggtgatacatttaatatcaacagtaagaagacaggtgggcatcagcttttacctcacaggatatacttcaagcgtgcatcacttacaaggacattctgcaaaatgactaatctgttctctttaaaaatatcaagatcacgaaagacaaagaaagaggggggaactattatagactgaagataaataaggcaattaaaaaactaaatggaatatgagatactggattggatcatggaatagacaaaagccattagtggaaaaactggcaaaataccagtaaagacagtagtttagttaatagtattgtactatgacaattccttagtttttaagattgtactatgaatatgttctaggaatacatctcgcatgaaggtatggctctgcataccttaggggaaacaataggggagctggctgaaggatgaatggtacacagcaactctctactctttctgtagcttttttgtaagtttaaactattttcaaaataaaaatgatgtaaataattgtctttacacgttagggatacttctaactgatttgaacttttaataaagggtatataatgttgaaagctgatccaaatcattgtgttaaaggaaatttgaaacaaagggaaaaagatggttgtatttctgtaacatctttattctagtactaaagtatagaatttaaataaaatatatgatttagttatagattagtcttaactaatatcagaattagtcttaacctgtcttgtgccccacctctgtttacattaccctaaaaatagtatataacacaaaacagaaagcatgcgatttctcaagtatattcaggaggttgattctggggtgtaaaaaggtgtagggctatacggcccgtcattagcaaagaaaacaattttcttttaatttagaaaacatttttttatccccaggagatattattggctcaagattactggcatcatagtgttgactttttcattatgaactttctaatagctaatatttttattactccaattatgtctttctcagtttcttctttatggctgagaagattattttagtcagcttgtgactttgattgggggattttctaagctaaagtgtaagagttcttaggtaattctatttcagtgtttagaatgctagatgtctatactttaaatcatgtaaatgtttatatgtttgacctcaactgatgtaagtgggttttattgagcattatttctaataataccatgtgtttgaaaatcccactattttaacataggtagattctgggtttaattactaaatttttttcaaattctgtgcaatcaaggtgaaagggtttgtttccaaggaaacaaatgcattccatttttatcacataaaatgttttctgcaagaaaattccataaccagtctccagggagataccgtgtcataaaatagctctccttggagatttttccaaaggaacactttattttatttttgttccctgaaaataatactgtatttgtgtaattttcattgtattgaatttttaaaaaattaacaacagagttgttgccatcgtctcattagagtcataaaatgtacaatttggggagaatgtgattttcctctgaccattaggttgcatttatatcggagtctaaatagcatgtattcaagatgttcacttgagaagaaacagcctgttctaatgatgatatttgtcaccttgaaggcttcattctttattggtatttatttgatgttggacataacttcttcttcttaagaaaatttgacagccacataatagtctggctttgcatatctattagtccattttcacactgctgataaagacatacccgagactgggtaatttataaagaaaaagaggtttaatggactcacagttccacatggctagggaggtctcacaatcatggcagaaggtgaaaggtacgtcttatgtggcagcaggcaagagtgaaaatgagagcaaagtgaaagggaaaaccccttataaaaccatcaaatctcatgagacttattcactaccatgagaacagtatgagggaaaccaccttcatgattcaattatttccgacttcctcccacaacacatgggaattatgggagctacaatcaagatgagatttggttggggacacagccgaaccatatcagcaaactattatgattgaattaagaaataaggaaactgagggaagtagatttgctttacacaaatctgagggattcttcttatgtacttctttttgtagtagttggccttgcccatgtgagtgtttgcatctagagacgttgtgttattcctcttgtagcttggacctaacatattaagtgctacaaaatgtttgacaatagaataaaataataaaacatttatacattaagaagacacatttttgaaatagaaaacaagataacagtgaaattacagtgggtggggatagcataatagtcaaaattagaagtcatagctctgccccttacgaagtctgtaacttagcatatcatttaaacctctctgtggccgggcgcggtggctcacgcctgtaatcccagcactttgggaggccgaggcgggcggatcacgaggtcaggagatcgagaccatcccggctaaaacggtgaaaccccgtctctactaaaaatacaaaaaaaaattagccgggcgtagtggcgggcgcctgtagtcccagctacttgggaggctgaggcaggagaatggcgtgaacccgggaggcggagcttgcagtgagccgagatcccgccactgcactccagcctgggcgacagagcgagactccgtctcaaaaaaaaaaaaacaaaaaaacaaaaaaacaaaaaaacaaaaaaaaaaacctctctgtaaaatggggaaagacatatctatttcataaggttgtatattaagataatatgtgtaaaaagtgtgtgtgctagaggaatttctttaaaatatgggaactattccataaaaagcactgtgatgctacacataatatgactttgtcttaattcaggagatgtattacatttttcttgtttttaatgcaaattccatgcatgggccagctaatgtgaaataatttaattaccttgctaggttaacactatcatctaaaaaacagaagttatttttaaaacattctgtgagagtttggacttctctcagcctaaccctaattctacaaatccccaaaattccaactgcagagatccaacatgcagctatctaactcatcccacatggctcaaatctttacatgacttagaagtatagattatcaatcaaagcaaatgggagaatggattgatttgtgaaatggcaacaggtccctcatgggagaccaagtggagcctccttaaaaagtttagcttgggcaatttgtgaacaaaagggagacactcatgactcatgacagacagtagcgtacaggaaacagtaaatactgacaacaaaatgtggcatttgtaaaacgttcattcatttattctttcattcattcattcatgtgacaattgtttatttagtggtgagtgccagggactaggctaaatgctgtccacatacatgatctcatttgaaatcacatgaaatttgggaaaatatgatcaatcccatgtagtggatgctgagggacacctcacagacccccacttaaggaccgaactacactcactctcccagctgtccccaaatgttggcagtcaaagcctcttatatgattctctatcaagatatgtgctctcaaccaaagatagacacctcacccagaatcatggtccttcctgggggcagcctgcatcccatgactgatttatgtaggctataccctatactcaattttgaactatactcaattttgaacatcgctgaagggtcatcccagctccagatcctcggtaggctcacctgaggcccctgttgcaacagaatcacagatcatctccctctgtcaaatcctgtttttctcacttcttatgggtgtgttgttcctaaaaccactagccaaataaatctgtagcacacaaatcttaaagattcagattctatttcttggaaattcattttacaagtgaagaatctgaagttttattatttcacccaagcccatgtaggcaatatgtggtgggattaggatgctgtctccaaatgtcatgcatgttgtaaaagcccagcaattagaaatggggttcaaggttggaaatggcccttataaggttaggcctttaccaggtttaatttttcaatttcaggttggcagtccaaagtctcaaaattagtcaaaagtgttgtgcaaaggtaaaaaacatataaaggtagagtggatatgtccaagtgtccccaatagcaggaagagggtaagagctaatgagcaaatgaagcttggtggaagtattgacaactagaagaagattttcacaccatttttttatatgggggctttgctaataagtcaattccactaagcagctacttatttgaccttattatttccaatatgtaataaaaattggaagatcaaaataaagaactataaacaacataaaatatttatgagaaatcatgtttaaagaacgtattaatgacattgaaaacaggtcctgaatctagaatggctgtacataagagagaaaatgagtacttatattaaaaatatgtatatgttggctatgaaaatggcaaaatcagataatgctaatattaactttcaatattttcaatattttctgaatgccagatatatatatatatatatatatatatatatatatatatatatatattactaaccagggaaaggatgatgatttaacattttgaactcttttagtaataacacattaattcaatcaacaatatttattgcgaacctactatgtaccagacagtgttctaagcaatgggaatagaacaatgaatgagaaacatggtccctgtcacaagaccgtatatcataccagaggtagggagacagtcaacaagcaaacacatatggaaacaaggcctctctgtcagctgacctctaagcagtgaggtttcaaccacttcaggatctgtgagaagagccttctaggcaaaagaccaatgtagaaccctatgagggaataggaagaactttggaaaacagaaagaaaagcagtatggctgaagcagagcaagtgatggggaaggtatagatgaggctttagggttaggtaagagcccatcacttgtgggctaggaaagagaatttggattttattctaggtgtgatgataagtttttagtgtgttctgaacaatagaatgacatgatcctttttttataagatcattctgactttagagtgtccctgaaaaactgagtatattcaatgaacattcaggcattacttattgaactgaagaggagatagttggagagcactacagtatagctgggagaacataagctttgtagtctgatagatctacttcaaaatccatctctgtttctttctaactggaagttatcttctgaattttaggtttcttttttatttgtaaaataggataataaaacttagtttgcagggctatttttaggattggcgactcatgttcagtggctgacacagtgttcgtgctccgtattttgtgatggcaatgaatgtggagtacaggaacataatataaattatactgacttttctctgatctcatttgttgttggtgctataaaggcctgcagataaactctgacccttcttaaagagacaaataattgttttattggccttttagtttcaaaggaagttagacatgaaggcctgctgagactgcgtgactggattatttctttcgtattatttctccctcttttttccccattgtcttgaaattgtgtacctcagacctactgtttttgttgtctccagatcacacagagcaacttttgatggaaacttgggctcaccagcatacatttttgcagtgtgtgcatttgcacttaacaattctcttcttggctttagcaatgattcaagaaaaagaccccagagaagaccaaggtcatccaacttgtttaacaggctttttaggactaggggactcagatagagctcagcagtggcatatcttagaaaatgttatgtttggaaattcttttcttctgaggtggcagtgagatgcaagagttgatataccagggctacttgctttgagggcatgcatcaaggacaaggaaccccagcaatctcctccaatgttgcatttttaggattttgtttaaagtgaaaaaaataggaggaagaggaggaaattgggagataaggactcagatacagaagcaggaaggttgcctctgtttttttcagtgagtgattctctttgtacagtgctattcacattttcccacaatataatggttcacaaaatttgtaaggtccaggtgatcctctcaacttcccatatattagagacagctttgggtatcaccatcaaacaagtatctgaagaaatctcaatgaatgttattattattattgcttatttatgaatctcatttcacaaacttgggaataaagtaaatattactgtctttactttcactaatgtatcctaatttctgtctccgagtcctattttgcttacctagtagaaaacttaagcttaggtctttctggcattctcaacctcaagagtgaatcacaattccttgggcttactgcaaagtatgaatataggacaaccttgtcttgagtcattgagcctacaggctgacttgaccataagaagtctgttgtttctatcctcatagcttctttaggtttactataacagcatgtgttacctccttgtaatccttggggcccaggaatcttaagcaagtcttcctttgatcctctctgcctagaagccatctccttcctggtgtcttgctaccttctcaatatactttggggaagcagagcccaggccctttgtactcttaggccccaaacctggaaggtggggagtaggagggagttggtagctggagttgggctttcactctctatatgtcccttttatctactgtcctaaaagctttctgactttccctatttctcccctgggagacaagtgagctcagggcctgcctcttgcttcagtggaagagaagggaataggaaaaaggcagagagagaaatgcataggttgctatctcaaaactatatacacaaaactggaaaaaaaaaaaaaagacttctaaggctgcccttaaagagtggaatcttttctaagatgagatagagattacagatgaatatgttgaaaccaaaagaacagttttcttgttgtgccagaaccatgctggcttcctagggaaaacatactctgattcagccagagaaacaattatgtcttaggcagatagttacaaagctggcaccatggagttgctttgaataaaccaaagcaattatgtggtcatttaaaaacttctctattttataattgaatgcactaagatagaagtggtacctagaagagcagaactctcaaaggtaccacggccttttaccacatctctcctgagcctctcttttatttttacagtatttgattcttctctttttgatatttcagggctggaggaaactcctactcatgttatcagacactgtatgccttattttacatatgtgcttagactcagcgtccaaagggtaccattgtggcttgttgggctgaacatgggtccttgacttgggaagcataggtacacgttccttgctacacttaattcatttggtggtctttaacaggttgcttatgctatctaaggctatttccttattttaaagagagaagtgaaaaatatctaatgcacgattttgttctgagagtcaaatgaaacaatgtgatgagaggttgtttgtaaaatactgttttatacaattatttccttttctccaaaactgtttattacatgtgtgccatgtgccaaatactttgtttggtctaggctttagagccgtgtagataaataaaatgtagtcacttctgtcaagcaatataatctggtgagggagataaaacagaaagatacagcgtgaagtcatatctgtagggatagaactatgtcatatcatgcataattacatagtcgtacaaaaggataatactagaattggcttcctgaagaagttgattcctgggttgagtcttataggatgaagaatttggtggtatgaggtagatgaatgagaaagacatgccaaggtatcaataacagaatgaacagacagtgaagcagcaagcacccatgtgttggtgtgtattggtggaagcagagggtggacagacatatcaatatagctggcacttacagttggaagcaatatgtagcttgagataaatataggcaggtagttaaagaacaaagattactttgatgaagaactcagatgtaattttttaggtgatgagaaatcattgaagagttttataccatcagatttttactttttatagataaccctaatgaagggattcgcagtgtcagcagttaatttgagttatcaggactagaatcagagagacaagtcagtctcgccatcaggggaagcaatgatgaagatctgaattagcacactggcaataagaatagagtgtgaagaatagggcaatgcttggagattgacttggctcttggagataatgattgaaatatggaaatcaaggatgattgatgccaatgactgggaacacatatagagatagaaacaagtttaggagtggataaatttagtttggggtgctcaatttgagggctatgtgaggcattcagtttgagatacacattcagatgctggaattatgaacatgaacctcagagaagagatctgggccaataatatagatgtattcgtatacttaataagtacagcttgagagactgcaaccatagaagtctcgtggtcaatttttgctctccaatactctcattttgataattaaaatatctggtttcatatggtagttaaatttcaagtttgcattttaagctaaagaatctgccctcccaaactttggacatgaaaaagatggaatgagggaggaaaaattgggccatgaaaggtctctcttgactaataccaatgtaatctggtattgggttgatctggttgtttcagatgtttcaaggtgattctttctcttgtgggtactttcatgggctcattgaagaattgcctactgaactatgctaattatagctcccttgatgtcagcagtgtgtatccttaggctggctacttacagccccttcccatccctcccactcaccatgcagttccactttttaatggtccactagtaccaccctaatctaagatatcctttctactttaagttctgctcaggtgctatagcatttatcctgaaacatggactagttgatatttgttcttccagggcttcaaccaaaaccaaagtagaatgaaccccatttttatcttctatttcagagatatgtgaattgttcaattagaagtggtaattgaaatgatgagatcctttttcttcccaccttcaccctcgcagtaagaatgctcacaaaggggcagggcacagtggctcatgcctgtaatcccagtactttgtactttgggaggccaaggcgggcagatctcctgaggtcaggagtttgagatcagcctggccaacatgatgaaaccccatctctactaaaaatacaaaaattagatgggcgtggtggcaggtgcctgtaatcccagctactcggtaggctggggttgaacccaggaggcagaggttgcagtgagccaagattgcacaactgcaatccagtctgaacgacagagcaagactccctctcaaaaaaaaaaaaaaaaaaaaaaaagaatgttcaaaaaggaagataactggaatgcaaaatacaaacagattgctgggagacaaaccatcattcagaaagtgagctaaggcagggaaggacagagacagagaagcaatggttgagatagaaggagaacctggagagtaaggagtcaaataaattacagagtaaagaggtctaagaaggaggacatagtcaacatatgggatgttgtgaagagatgcaatattatgaggactaggataggaaaatattagattttgctatgagatcaattgctatccttgcaaggaaatccagttagagaaagggaaatggcaagggtttttgagaagtgtggatgaaagaggagaaatattagatattagatacaggagatgtggggtcaatatagagtttttagaattggagaagccagcaatgttcacaggctgagggaaaacaggcatagtgagggcttatttgaagagccaggaaggaagaaggataattgatggtagatggttaaagctgattatttctcttttgggcacttttgatgtctcgtggggtgtaggaaggaaggagatcaagagcatagtgaagaggttaggactgattagaaggaggggtagctcatccgctgaaaaaggagaagtgtgacataagcatgcattttgatttgtttgttcatagtggcagaaagctgaatgagatcatgtctgatggctttaattttctcactgaaataggggataaggctctgtgctaagtgtggtgaaccaggatctgagtcacttctaatccactcatttagaaattataaagactgaactgaatggagtggtattattatacctaacatacagatctggaatctgtgattcagaacacttaagtggcttgcttgaggctaccctagtggctaatgttagagtctggacagcatgaagagtccccagatcatcaggttattggcacttgacagtctcaagaaattcttatgttccatctttatcggcccatcaaagaataagaggtaaaaatagaaaattgcaaaaggagttgtaaatttatatattctttatcacctttcccctctcctttttataaccaaactttaacatttactgaatatctaatatcttctagtcactgtgataaacgctattctgggaaatcaaatatgtagctgatttatagtgagcacttattatgtatcaggaactattctaagtattttatgcttataaatgaatgtaattattttatgaatgtaatgaggctggagaactcttgtctccatattatagagaaagaaactgaagtccagtgatgttagctgacttaaacacagatattaaatgacaaagctaggcttgtctagctacagttcccacagtttaaatcattacaatatacgtagtttctactctcaaggaacttaccttcttttgggaaagcaaaaggaaaacatggttggttttaacaaataaagcaatcaaaagccagatgatataacactacagaaaaagtaatggcctggcactgtgggtcacgcctgtaatcccaacactttgggaggccaaggtggttggatcacctgagatcaggagttcgagatgagcctggccaacatggtgaaatcccgtctctactaaaaatacaaaaatttgctgggcatggtggcgggcacctgtaatcccagctacttgggaggctgaggcaggagaatggcttaaaccctggaggcggaggttgcagtgagccgagatcatgccactatactccagcctgggcaaccaagcaaggtcgagcaagactccatatctacagattcaaaagaaaagtaataatatgggccatcatgaattgcaaaatgactaggcatttagagatacaggaaagagatgtcagatggactagattgtctgacaggtaggattaatacattttgttaatacaacactaatggctaacaggtgtttgttgaatttagttgatcaaagagaaatagtccagtcagccttatcatttatgtgcacatatataaaactttagacctttatattaaacccaaatcaccaagctggactttgccttctttcaagtgttttcccttagaacttttattgccagcaaacctaagctataacctttccagccactgggataggttctactaacactgaactccaaaaacacctctccaagtgggagagggccttgatctttttccttttagctaaggaagctctttgaccaccataaaaatttgctggttttctccctactttatcaacatatcaaaggtatactgagaaaggcagcttatattgggacccaaaaggtctaattataacctctgtatttgttttctattgttgatgttacaaattaccacaaattaagtggcttagaataccaaccacttattgtctcatggttctattcatcagaagtccaagtacagcatggttcaactgcttgaaatctccaagccaaaatcaatgtgtcagcatgtctgccttcctttctggaggttctaaggatgaagttgctttaagttcatgaagattgttggcacaattcagttccttgtgcctgtagggctgaggtccctgttttcttgccgaaaaccaaccaggaaactctcttagctccttaatactggccagtttcctcatcccattgttccctccatcttcaagccagcaaaggcacgcccttctaatgcttcaaatctcctgggctttccacatcgctctccctccagtaggagaatgttctctactttaagagctcatgggattagattgggcccatcaggatattccaatatcgtcttcctatcataaggtctgtaaccttaatggtatctgcaaagtctcttttatcatttaatgtaacatatctatgaattctaagggattaggggatcagcatcttctgagatccttctgcccactctaccatccccctagaaacaagggagcattactcagaatagccacttaaataattccccctcccccctcaaaaaaaaaaaaaaaaacaaaaaacaacaaccaatgggccaaacatacaaaaaccacatctgcaccagagccaggtatctgctgactctccagctctagtcagagaagaggtgaacatgttttgaaaggaaatatttttcatcaggcatcccattgtatatgttggacgttagaccattctttacctatatgaggtacttagtaaatagtagctgctgtgatggtgatgaaggcagtgatcccactagactcaacttaagacagaatgctagctactgaagcagattcaaagcaatcaaacttagcttttgccttagggaaaatgacaggtacacaaacacaggatggagcagtaaacgccttgaaaagagggacctttttttttccttttgatggctgttcttgatgcttgttttaaactgttatcacccaattaaaaatgatgcaaagggtggaaagcagggtttgttaacacgggatttaccccaactgccactcacttcctgtgtagtgccaatcttgcaaatccagaaaggccagccactcgaaaccgcctcagagagggccaggaaccaggaaaggtcagcaaagcctcttggatttaaagtaaagaaccaggaaacaaagggctcaacgcaacttttacaactacaaattaaatgcaaaaaatgacacatcattacataagcagcataaaatataatttaaatgtcaaaagaactgaagattcttgaatcatgtaagaaaaacttgcagaatgtgttaaatgtctcaatttgtactataccaaaaaaaagtaaaaagtaaaaatggcattgttttataatgcaaaaatacagaaatcagtcttgttttcctgctgtttatagaaatccttaggcttattttagccaactttaaaaatattcatcttttaaaaattctcatgactttcagggactgtggatatatttgaggataagagggtattatttaacttaagacagtgcttaaatgtgatatgtgtgcctattaaagttacagttaaatcttttatatggatgcattttcattgggaggagtaggcgtttcacagattgctctactacttggaatatgatttcacatacatttttgctctcttgaaaattagctttgtggcaattggtttccctacttctgccacccacttacattttagatctttgttttgaagcttgtgagatatatttaacaacatcatattaacattttaggtctctgtctgaatacagtagttccacattctttggcagatgcagaatttttctagtttttggttgtcaaagatatcaatgtaaacaaagctaaatgtgtgtgtatgtctatacatgcatttgtatgtgtatgtgtgtagtataagctatacctagaaaatttactcttcaatcatttattaaacatttattgagctcttactgtgctccctgccattacctaagcactgagaatactaaggttactaggacacagtaccctggattcagagagctctcagaatattggttgagggaaacttggagcagtatattgtggtaaatggcagccagcagtgcagatagaaagctttgagaatatatatatatatatatatatatatatatatatatatatgaagaaacttactttaaactagggcagaaagaattgagcaaagtttcccgaagatgactttattttagtgaataagtcttatagaagtaatttgtttattcaggtttctaatacttttggcattttctcagattggatgaattcctccagtttagtggaggggacatatgaaggaaaggagagtgagttagggaagaagagagagtgaggagtagtctcagaaagcctcctcagaaagcctcagaaagttatagcctcctgggctcttgcctctgggaagagtatacatacaatacttgccgggcctatgaaaggctggacctgaagggcatcttaggtcagtttcctttatgacaacattttcctggacagtcttcagtagtgctacctgaagtcacataggcttccctcccaggtcggtcattcttcaaactagggcaccaacacaatgtattctgcacctgaggtatcatgaaaacagcaagggagtagaaacatagttgactcttgaacaacataggcattaggggtgctgaaccctcgcacagttccaaatcgaatattacttttattccccccaccaaacttaactactaatagcctactgttgctcagaagcctcgcaggtaacatactcaattaacacatatttgtatatgtattatagactgtattcttacaataaactagattaaagaaaatgttattaagaaaatcacaaggaagaaaaaatatacttattatttattaagtggaaaagggtcatcataaaggtcttcatccttgttatcttcatgttgagcaggttgaggaggaagaggaagggggtggtcttgctgtctcaggggtggcagaggcagaagaaaatttgggataagtggacctgtatgctttaaacctgtatcgttcatgggtcaactttaattctacataacctctaagaaagtcaacagtagtgctaaaagatttaaagtcacttctgccagtttacatgttgctttgcttggctcacttcaaaattaggaaacctataatcctttgccaagaattcagtatgcaaatattttctaataaagaaaatcataggaggaagttgaattttgttgcagtatgccaacacactaacagtggtttttttttaaatttttttgacagaatgcagtgttagaaagcaagcataatagagttcatttacaagaacacctgctttaaaaataaccctactgttaggaggaaacaacttctggactagttcttttgaatggaaaaatccagaaacgaacaggaaataaagttgttgtgtgttacatacagagcatttgcatcatgggaaaagctttatattccttttgaagtgccacaattatgttctcatttaataatattgtaatgtcggtgctttgatcttttgttatctgtccacatttggtaattttgtgtcttacagccttcagttcagaaaaaaagttagtcagaaagaacagttgaaggtttccttcaatactcagttcagctaccagaaaaggtctccacagaagatttctctcccagcatcagagaatgggtgggtaatatagagtaagctaagggagagagaacagttcagctcgcatctgtgcttcgcatctgtgttgtaacaggcatttataaaaggctgtagatgcagtacgaagaccatagcacaggagccacacagctgattagagtaagaagcccagaaaatgctggaagaatcagaagagcatcagtttagttcaaaagatgcttatgaaggacttctcttttgctagacactgaactgcagtaaaagtgaagacaagggtttgtctttgtttctagtgagagaaacaggttcattcacaactaactgtattatgagccatttatacaccaaaatgcagaattcattttagccaggggaagtaaggatgattcattgagtagataatgtttaagtggagacttgacaatagggacaatatttgcaggtagaaaatggaaacgtgggaatggtaggtggatcaggcgttacatctggaatccactgcaacaatctgagcacggttgaagtaaggagtaatgcagagagatgagactaatagggctttggttaattggaacaggacagtgaagtcagaagatccttgatgctgtgccagccagggtgcttctagggtgggaggtgatgccatatagtggaatagcagacactgctgggcatacctccttatgaacaggactctaattctaatttgaaagccaatgtgcttaacataaaatcaccattttctcagaactaccttgtagcaagggatggctatgtaacatagtttaggccattgagacataagcagaagttgaaatataagcagaggacattctgaaagcctcttgaaaaggagaaagacacagctgacatctgcctttttcatgttgccctgcacccttctttctactcgatttgtaggaatgggcagccatcttgtaaccacgatggcagatgtcttgtgggcagatgtcttgtgctaaggatcctagagcaggaagaaataaagagcttggttgagtatctgcaataactcaggtctgcctaccccagactccttgttatgggagaaaaataaacttcttatttgcttaaaccactgtaaccaggtttctgctagagcagctaaattgaatccttactgatatagttggcctgtggggaaaagtgaaaatagttgagcagaaaagttgaatggaagttacaagccctaagaattgcaaggagggagaaaggaaaactttccagattttcccaagtcagtaccgtgcaaacggttccaggtttttttccattgaagaactgcacgttattacatccatccattcaacaattaaacaaatatttatttatttattgtgccactgttatgtgtcagacattttactggatgccagggatacaaaaaggtatatgatgagacccttcaggaagcacatgatctaatagaaacaagcgcgtcaaagttaatcataaatagtttggatttgaaaactgtgatttataaatttataaaaattcctgaaactctagtagagaataaattattttcttccagctgcaccaaagatttggaatgtaaattggttactgatacaaattgagcatccctaatgtgaatatccgaaatgatccaaagttagaaactttaagcattaacatgacactcaaagggaatgctcactggagaatttagacttagattttcagattaaggaggctcaatcattcaacaggtaagtataatgcaattattccaaaaatctgagctccaaaagacttctggtcccaaacatttttggaggataagggatattcaacctgtacattagtgctgcggaataaaagaggccatggtactttttcaccagtgactttgagttaaaggagcacaaaattagtgtctttctaaaggaaaatgaattgagtaactggagaggtattctcttgggagacacatacataccaccagtggacagttatggatggctagtctactttcatacacttccaaaagttcccatctccacttttaaaaaccactgcatcccatcaaaattctaactttttacaatagtagaatggactgatgtgtgaaatagaatctctttatgccttgatgaacctatggtggccgtgagtagcaatctacaaacttgactgctagcttctaaaacaaacatttaatatcagcattaacctattcctttccagacattcatcaaacattattgatcaccccctatatgacagacaccatggaaggtgatgagaaaacaaagtagggtggcatggtgcttgcccttaattttctgggaggctgtgtatcactgcaaaaggaaataggcaaggagcaggctctccagtgcaggcacctaagggaactgcagaaaatacatggatggttaattagtaggaagccaagcagatttgatagtattagagtccaagagaaccttgtagatagtataactagcaatgctggagagcgttgcaacagtgggcaaggctactatttctctgccctgatatttggactttacaaataggtggataaaagttcccaggtatataactgacccttaggtgctatgggctcttatgggctccaaaagccaaaacataggccttttctggggataagggcaccccatcatttatctttgtatgatgaatgcagttatgttttgaagtcttgagtctcagggaactttggaggtcaagtcatttctgagctttttattgaagtagcaatcctgtggtcttcagatgatgggaagtgatttccgcaaaagcttttatgccttaattgcttgtcctttaagaaatgtggtatgagataaaacaaagaaggtgcctttccagccagttcattacagctttgcttcccacagtgcattgttgtgcttctctggataaatactaagtagtgtttttctcctaattatttcctcaaagtgatagtatcagccctgatgttgaataatgatctctgctattattaagattttgtgtgtgtctgtgtgttttgagaattgtgtgactgctatatgactgcaatatttgcttcgcttcacaaaagtcagtcaggacaggaaggcatttgacaggttaactagtccacccctcacttctggaagtaacctttaacatctgctgttagatattcttcttcttttctgttcacagcctaatagaaatatatcaacactactcatcctgaacaagtttaggagaaggccattgcctgggtagcatgcttttttttttttttttttttttttttttgagacggagtctcactctgtcccccaaactggagtgcagtggcgcaatctctgctcactgcaagctccgcctcccaggttcacgccattctcctgcctcagcctcccgagtagctgggactacaggcgccggccaccatgcctggctatttttttgtatttttagtggagatggggtttcacagtgttagccaggatggtctcaaatctcctgaccttgtgatctgcccatctcggcctcccaaagtgctgggattacaggcgtgagccaccgtgcctggcctgggcagtgtgattttatggacttagtctaccatgactttttcccttggatgagcagctaaacagttaccactgttgcacaactccactgttcaaatcagaatctatgtgaatggtggtcctgaagttgtgcaataaaaaatgcacagagtcagacctcacaactctgagctaagatatagatatttgaaatgtgtccaccacatttcaagcatcacactgtttgggagcctgcttgctattctgaagactcaaagttaaatattaaaatttcatgtaaattttgcttctattctattatttgtttaagacacaaatcctattttaaactacgtaccgtagaggaaaattagtgttccattaaaagtgaccatgtttaaaaatctgtactttcttgttcctattgcacactaaaaatgatgggtaaacacaaaggacaaaggacagcttctctaatgagctgtatgcaactctagggcctggaaattcaacccattttgaatttgtggatctatgctctcaagggtttatatatgactacattaataaatcagccaatagacttcaaataggttgacagcatgtgaaatccaagtgaaaaattttgtgcagtgaggagcaattcatgtggaagaaaagcaaaaataacatatttgatcaatatattatacttcagaaagcacttgcacatgagactgtgacctttgtcagtcaaagaccattttcaaattatttgtgttcccattgctataagcaaaagtaaattcctaataaatatttcctaagttaattcttaataaatattcgttatcatatttggcccacctaacagccccgtaaggtcaggaatactatcattttgcaaaggatgaaactgaggttcaatattgacttgcccaagataacactgttagctgatggcaggattgggaaagggaacctgaaccatgtcccgtgattcatcaacagtgcactgtctatgacaccagctaccttccacatgcccacactcacagtttcctcttaataaacacacaatttcaggggagaggaaaaacagtccatgcattttgagttgctttttctggttcaaatgcctggtgcagagtaaaagctattttctaaatctggtaaatcttcttgtctgcttggattcagtcagacttcagaatggaatgagcaaattatagatggcagtaatagggtgcttccagtggggcgtttcttagccactttattctgcttcttggagctccacttggagatgttttaaatcactcaggaagagaaactagagtgagaaagccagacttgtaaggagctctgtcctaacaggtgtctttaatgatttgctattactttatcacttgaggcactaattatttggaacgtacccaagtaaaccctaccaagtcttgcaaaaagacaatagaaatgaggaaaacatgttttctcttctttggggcatcactatttcatctgtatcattaaaagaatacattcttgggccaggcatggtggcttatgcctgtaatcccagcacttagggaggtggagatagatggattcttgaggtcaggagtttgagaccagcctggccaacatggcaaaaccctgtgtgtactaaaaatacaaaacttagccgagcttggtggtgagtacctgtaatttcagctactcgggaggctgaggcacaagaattgcttgaacctgagaggcagtggttgcagtgagcccagattgcaccactgcacttcagcttgtgtgatagagtgagatgctgtctttaaaataataataataataataaaataaataaaataatacattcttaggaacataagaatttgcactagcttccccaaggaattttctatgatctgctcacttgttatctaaatcctgtctattcttgaaggatgctgaaagctttctatgccgattctatttcacacaataatgtccatgtcttactttctatagtttgttgttttttaaacatctttattgatttataatttgcaaagcataaaatttatctttgtaatgtttacaatttaattatttttagtatatttatggaatcgtgcaatcatcaaccacatttaagtttaaaatttttgggtatctcccctaagaaaccctttattaacattcactctccatgagcattcactctctactaccaccatccttagccctaggcaatactaatctattttctgtctctacagatttgcctattctggatatttcaaaaaaatgaaatcttacagtatgtgatcttttgtgattgacttctttcatttagcataatgtttttagggtttattcatgtagcatgtacctgtactttattcctttttattgttggataatattccattgtatggctacaccatattttgtttatccactcatcagttgatgaacatttgggttctttctagtttttgactatcatgaacaatgctgttatgagcatccatgcacaagtttttgtatataactaggagagaaatcgctaggtcatatggtaactatgtttaaccttttgaagaattgccaaattttcccaaagaaggtgtaccgtttttcaatcccttcagcaatgaatgagcattctgatatctccacatccttgccaatgctttttactgtttgcctttgttattttagctaccctagtgagtgttagtggtatacaattgtggttttaatatgcattgctcttgaatgatgatggtgagtatcttttcatgtgctaatggccatctgtttatattttttttgagaaacatctatctaaatccccatttaaattattatatttttaaactattgagttatttatatattctggacacaagtatgtctgattattgattatataatttgcaaatattttctcctattctatggattgtctttttactcccttgatattatcatttgtagcacattaattttgatgtggtcaaatttgcatttttttcttttgtcacttgtgctgttggtgtcccttctaagaaaccattacctaacaaaaggttatgagaatttactcctgtgctttcttctgcaacttaaggtttgggggtgctggggtgctagtaatcccagaactttgggaagccaagatgggaggatagcttgaaggcaggaatttgagatcagcctgggcaacatagtgagacctatctctccaaaaaagtgaaaaattatccaggtgtggtggcacatgcctgtagtcttagctactcagtaggcggaggcaggagcatcccttgatcccaggagtttgaggatgcagtaagctatgattatgccactgcactccagtctgggtgacacagcaataccctgtctcaaaaaatatataaaataagataaataaaatgaaaaataaagtttggactctgataaattttgaaataattttttaatatgttgtaaggtaggagtccaactgcattctttgttatgtgggtagccagttatctcctcaccatttgttgaaaagactgttctttccccattaaattgttgtggaacccttgtagaaaattaattggccatacatgtgtgagtttatatctggactctcaattcccattccattgatctctatgtatatccttatgctagtatcacactgtcttataactaagactttgaaatcaggaatagtaaatcctacaactttgttctttttcaagatggtgttggctatttaggggcctttgtaaccccataagaattctggaatcagcttttcaatttctgaaagaaaaaaaaagggccaatggaattgtgtcaggcattgcactggctctgaagatcgttttcacattattcattgctaacatatggaaataaaattgatttttatatgttgatcttttgtcctgcaaccttactgaagtcatttattagcactaatatttttctatcagattccttaggattttctatttacaagattatgacatctccaaatataaattgttttacctcttcctttccaacgataatgccttttatttctttttcttgcctaattgtactgactagaatcttcaatataatgttgaaaagatgtggcaagagcagacagcctcgttttgtccctcattataggggaaagcacccagtctttcactgttaaatatgatagtggctgtgggtttttcatagatgtctttcatcggattgcagaaattccattatatccctactttgttaggtattttttcatgaaaggatgtggaatttgttatatgcttttactctgtctattgaaataatcatgtggcttttattctttaatttgtaattatggtctattacattaattaactttcgtatgttaaaccaaccttggattcctgggttaaatcccacttgaccatggtgtctaatgcttttatatgctgctgtatccaattcgctagaattttgttgaggaatttttatatcaatattcatactggatgttagcctgtatttttctttccttgtgatgtcttcacctgattttactatcaaagtagtactgacctcagataatgagttggaaagtgtttcctcttcttttatttgttgaaaaaatagattttataaggatttgcgttacttctttaaatgttggatataattcaccagtaaagccatgtgggtttgaacttttcattgttgggtgtttcgtggaacaaaggacttacaggcaaagagaacagtaaaatgtaatagaacttttttaaggagcaattagaaagcaaaagcagctgaagctgaagtgactccccattgcctacatgttaaaatttaatctcattagtctggttaatggctcttcctaatgtggaacttgctgaacccctccagcttcattcatctcctgtcactatttctctcacactttaagcatcttccatgctgaactcatgataataatagttactctcttccaggcattgtgttaagtctgacaaaatctcaatcaaccattatattcaaattcccagaaataaggctgctcttatttcatgactttgttcatgaagctcttactccccagaatgaactatgcctttattcgtttcttctccctgtctgcctctgtcttgtgaggctgaaaaattcctatctgtggtttaaaactcaccttgagtgtcacctaaataaaacaccagtgaagaatgtctaacaatctgggtactttttgttaatctgtctgtttctcacctattgtaagtcttttgatggcaggcaccatatttgattcatctctttatttccgatcttccagagtgcctgtcacatagtagacactcaataaataattgttgagctaatgaataaacctggctatccagaatgaggctctccccagcattttggagagctgagatgttattgtacttctctatgtttcttatagcacctagtgcaacactgagaaacactcattgaagttaactcgactgaatgataaattaatattataatgtcagtagcacattttgaactcttcagtaaaaagacaccataaaaacctcaaagtagctgtaaaaaatagaaatgataaaaatctgtttagatgacatcttttaagaaaatacaaaaacaattctgttatgttttgatacataattacacttgaagatttttggtgtaacagagctgtgtttgagaattctagtgatcataataacagcactgcttgatgctaggggagggtaaatccattttagaagcttttcaatgacaagctttgttctctgtatctggaagcaattcccagtgctgtttacttaaatgctttataatatggaaaactcaggagcattgtaggatccccaaagacaggagaagatttaatgtttcttaaattctccctctgtcacaagatgaagatgagcaggcagggtggcagcactggctgtggcagcagcagcacaccaccacctatgcaaggtctgtactttttaacacagcattggaagccagtatcagtcatggttctccagagaaacagaactgatgaggtatgtatatgtacatatatataaaatatatatatgattaagtgtgtgcatatatatgtgtgtgtgtgtgtatacacatatatatatttatatatgtgtatacacacacacacacacacacacacacacacacacactaagaagtttattgtaaggaaccagctcacatagttgtgggatctggcaagtccaaaatttgtagggcaagccaacagactagaaactcagtcgggagtcaatgttgtagtcttgagtctgaaattaataggttaggctagcagactggaaacttaagcagatgtcagtgctagagtcttgaggcagaatttcttcttctctgggaaatgtgtttttgctcttaaggtcttcagctgagcaggagaccccacatgcattattgagagtaatctccttaacataaagtcagctgattgtagatgttaaccacatctacaaaacatctttgcagcaacatacagattattgtttgattaaataagtgagtactatagcctagccaagttgatacatagaactaatcatcacaaggtcctttgacacatggaacatgcttccctctcccaccttgtattttccatgacttctcatgccccacaccagattgcaaagctgctctgaagaagccctgcagttctctgccttttggtgcctttgctgttttctccatccctactctagattctctctcctcccagtgtccaacccagttgtcaaattcctactctcatctcttggatcctgtgcaaatgtcattttccttcccaaaccttggctgctttctggtttaaatatcgtctcttcctctcttgaacccccaacagatgtccttgaagtaaagcctccttgctctgctttgcattatttgtaaatgtattcatggcaaccatcccctctcccttgtaacctgaggggggtcaagaacctcatgggtttttttgttttgttttgtcttgttttattttaatgtctttgttcccaaaagggtatagagcttccattcatatggcaatctttattctttttctgtgccctgtgctgtgctagcttctcaggaatatgaagattaattagacaagtttccagcactctgagactttatagcccagtgcggaaggcagataagtcaaccgtaggtgtccacaagaactcattgaactgaattaattctggctgtagaagtgcagtcactttccttttagtatctccttacctcaatactcctacatacagacattagccagaccagacagcaggcttgtagtgggctggaaaggtctgtcctcacaagacttatagaggagtagtgtgtgtgatgtgacctgaggggcatcaaggaggttcgctgatccaaaaatatctctgttgctaagatgcctgatataccatcatttgtgattcattcatctgggttcagaattatcctatctctaaatgcacctgggaggaattactaaatgcctacattaactttttaaaattcttttcccttctttctttacctttttatcttccctttctcctttaaggcagctaaattgctctccctgaaagactcccaccacacaaaggagttaagagctcctccccttggtcccaatagcacctcgtgcctgttacagcagagatgttttatcctctaattcttatctgtttattgcttacctgagctcctccaccagactgagctcttaaaggggaaaactgtttttcatctctgtaatctgaacatagagcacagtgccaaacacaccgtggaatgttctgtaagattcctggaatgaccaggcggttctccatgaagatatacctgtttacccttcttctttgatagaatgacccatgagcatatgtaggggacaggcttgataaaagagaattgaagggcaaagagaagagaagagagataggaaaaaagggactctcgggaaatcacttctgtgcctagggccgtccttgatcctgctgtctgttgtccactttttggtttcattcatggataaaatgccttgtgaattaaacatgctgttttcttttgttttgcaatacatgatctgaagtaccatcagctggcaggggtttttccagaagcattttgtcaagtggaaaggtggctacacatgctccaattacaaaagcaaaaatgctttcaaatatcttttccttctgcatggattgagaacacaaacctcttctcatgcctgtctcttccattcgctacacctttgcctttgctcaaggaatatgcttgtaaagatatccaaaaagtgctttttccaagccccttgtggttgcagaatgcagacctgcaaaaatttcctcaagtaataggatgggaactataaaattgcatgtaggctggcacagtgtgtaatcttgcactttgggaggctgaggcgcgaggaatgcttgagcccaggaatttgagaccagcctgagcaacatagtgacacctcatctctacaaaaaataagaaaataaggcaggaggatctcttgagcccgggaggttgagtctgcagtgagctctgatcctgccactgcactcctgcctgggaaacaggagtgaaactctgtctctggaaaaaaagaaagttacatatagattggagctgaaatcaagatggaagccaaggtgcctttggagtcagctattttctgtttttctctcattagctgaatgagctctttcttctgctctccttccctccacagactcattccattttcctcttgctcctctttccctatatgtctcttctctttcctcgtgtcttctgcctacctacaatttctgctccctcacaacttcacaggacccatcatggctgccccagacactcactgcctcatgatttcagattcaaaaatatatgcctccacgtagataccccatggttcatacttattttaatctttccagaaatatgttcttaaaattaatttttagcaaggtcaatcaataaattggttcatttgccctaacataatctagagctgattttatattgttacctatcatttgtaaccactagattatttattttttatatatacatatttatatatacatgtgtatatatctatatatacacatatatgctatatatagtacctatagaatgccaagatttgtgctaggtactggcaataccatcatgagaaaacacaaatctgccctagtgatattaatttctaactgattactttccttctaacttgccctcatctaatctaacttcaaatgagttctctttccaacacatgaatcaaaccatgatattccctgcttaaaatcattactgacatttatcatctaaattcacataaggatgttttactacctgcttctgtttttatttctgacccctgcctgatttcttgtactttatgcttctacaaaaccaatgttaatccatgcccttgacttggcacatgacagaatcaggagaagtagaaaagggatgaagtaaagataaacttgagagacaggttgattcagtgtctaaatgttattatcctaactaaagtgtaaatatcacaaaacctaatattaccttaatatagtaaacatttgatatatttttgttagagtggattaaaaagtggcatttgtggttttatctggcttcagattcattaggaatgagtgagtgaaaggaacctaaaagggtgagttcattggtacatgaacaatttaatcctttttcggtctcaatagctattattgtggctaacaaagcaactcttataagttgcacacaaacaagaagtaggagagtgtttatgatgtcatcataaatatttataatagggacatgatacaatgttttgtgagacattgttgagaaaggttagacagtgaatgctcatttagatcaaaatcaaacacctgacacttgttgagcattttttaatttacaaagtatactcacatttattatcctatttaaactcaatttttcaatctacattggaccattatcttcactgggtaagcattctctaatatctccatccttagactccacattccccatcagaaaaaaaaaacaaacaaacctgtatatcttctttcttttacagcaaagcccaagagttgtctatgttcattatcttgactttctcacctaacattcttgcgtcagtcaagtcagatctggtttttgttcccacaacttcactgaaattgcttttatcaaggtcattaggaatgcccatcgtgtctattcactctctcctcctggaaacactcttcttcacttggcttcagacacagtatatttcactggtttcccacctacctcactgggttttgctcctccacacttttaatggtcccgctcctcagttattgtctctcttactcccaaggtgatctcaaccagaccctagttttcaacatgatttgaaagctgatggctcccaatttctatcttcaacccagttctctcccttgagctctaaacttgtgtagccaacagccttcttaactctctttagataggcatctcaaacttacaatcctaaaactgaaccctggaggaccctgctgtaatgccagtgctccccttctcagcaagtggtgctaaattcatgcacagatgccgccctagctgaaaatgtagatgtcatccctaagtcctctcttttctcattcgcagcatcttgtctgtccacacgtccctagaatctgactagttattactacctacacctctgccaacctagagaaagccacctttattgtcacttagacttctggaacagctttttaacttggttcttcacttcctttctagctccttttgcagtgcagccaaagtgatactttcaaatgatccagtggtattccctttacattctgatgaaaacccagttttttctagaacttatagaccttcatgacctgggccctacctttctgttcaaacttagttctaccttaaggtatttgcatttactggctctgtctagaattttcctctaccagaccttctcataattcattccctcaactccttctgattctactcaaaggtaatctctcttcctcatcctacagctttttgtcccttaaccctctttattttccttattcccttactggtcaatatagtatatatttgcttaattatttatgatctctctttctctcagtggaatataattccaagaggtttgttttctcctgtattcccaacatctagaacagtgctataatattgtaggtgtccaacaaatagatattgaatgaaagaatgagatttaaatataaaccttttaactagaagtcaagtgtttttttttcatgatcaaagcccatgtaaaaagtgatcatcttttcatattttttgatatctctagcatattctgaggaagtattttgagaacatgatttcagattcttttggataaatggagatacatgatattagagcacttgtgtaattgcagtttgtgttgatgaggtatgggtttatgatagagacatcagcatcatctccattggtacagaagcatttcacactaatattctactgcatagattgaggcataattccaacagtggcaggagaattgccctaaaaatataggaattcacaaattttaaacttttgacccagtgaaacttaaaagggcagcagagaaaacacaatggtattacaccaaacttaaaagctactgcacagcaacagaaacaatcaagagtgaggagataacctataggatgagaaaaggtaacttgcaaactgtgcacctgacaaggggttaatatccagcaaaagaacaagcaatgctatttcaaaatgggcaaaagacctgaatagacatgtaaatgagtgacaggtatgtcaaaaaaatattcaacatcactaattgtcagggaaatgcaaatcaaaaccacactccagtagagaaaggggaactcatatactgttggtaagaatgtaaattagtacagccattctggaaaatagtaaagagtttcctcaaaaaactaaaactagaagtaccatattatccagcaatcccactactagttatatattcaaagaaaatcagtatgtcaaagagatattgtcactcccatgtttattgccgcattattcacaatagccaaaatacggaatcaaactaagtgcctatcagtgggtaaatgaatacagcaaacatggcatatatacacaacggaatactatccaatcataacacaaaatgaaatcctgtcatttgtggcaacgtggttgaacttggaggacattatgttaagtgaaataagctaggcacagaaagacaaatactgcatgatctcactcatttgtggaatctaaaaaagatgatctcataaaagtagagattagaatagtggttaccagatgctgagaagggtagtgggtaaaggaagatggagagaagttagcaaaagggtacaaacttacagttaggaagaacaagttctgatgttctattacacaataaggtgacacgtaataaaaatgtattgtatatttcaagatagctacgagagagaattttgaaagttatcaccacaaagaatgataaatgttttaagtggtgaatgtgataattaccctgatttgatcattacataatgtgtacatgtattggaacatcacacttaccccataaatatgcacagttattagaggtcatttataaataaaataaaactttttttttttttttgagaaagagcctcactctgttgcccaggctggagtgtagtggcgcattcttggctcactgctttgcctcccaggttcaagcaattctcatgcctcagcctcccaggtagcagggactacaggtggtgtgccaccacgcccagctattttttttttttttgtatttttagtacagaaggggtttcaccatgttggccaggctagtctcaaactcctgacctctcacctgccttggcctcccaaagtgttgggattacaggcatgagccaccacacctggccaaaataaaacttttttaaaaaggagagaaaattcaagtattaaaaagccacttcagacaatctgtttgtaaagtgctatagataataggattttcgacatgggcttgagtaatcttgagggttttgcctggtgcctcaaatcctcgcatactggggtagtgtcttttattcctgtagaaataacgtaaaagctctaatattccctgtctttataggccatgaattaagtgttccctacactttcctgggaagcatttgaaattgcttcaaaatttacagagaatagagcagctgccatttattgtgcacctactgtgtgcccagcattttaagtctgttatcttatttgatctttaagttcctgaattaggtgtttgtagtagacatttatagttttgtcaatctggaatagcctcctccctcttctaggaaatgactcttcccattcacatgctggatgttttaatagggactttacatacagctcttgcctgctggccagaggagttgtctgggaccaagaatgaaccaaatagagtcctcacacaggatttttacagtgggtgttaaaaggggaaaattgtgccctctgatcacaataccataaggcataacccatgccaatgtcccacggtgtagaggagtaggactgagagaatttaccaggtatatggagaatagagacagaccagaaacaagagacccaaaggtgtttgaatcctttctgtcttctttgaggttggcgctgcctctaccctttcaatcctttcaattgcttctttatatgaaccaatggcttcctcatttgcttatgtctatttaattggctatttgacacttgcaattgcaggagctctacatagtgcagtaaattatatctcctttctatggatgcaacccccaacgcataaaaagttaaatcactttttaccagttacgtggctacatgagattaaattcaggtctgtgggttctaataaccttctgctctgtccagtgcattacattgccattctttttacacctctgaaagggtcgcactcagcagatagttaaatatgtgacccaatctatttgtttttttttaaatgtagacaagcatctaatgtagttacaagaataaaaagatatctaagtgtcctcacacacgtccttgcttgtttctttatttgtaaaatggccaagttgaaatctatgacctctgaattttgtttctcatggaaagttgtctaaaatcaaatagattcttagtgcctctgaagatctaattatactgactgtgcctctaggatttatttaaatgtgaaaacaaaaggaggtgcctctatcagacttcatgatcatgagccaagttggcttccagccctccagcaataactctagagtggcactctcagaacatcagtatcttattatttccagatcagactcctatcctaaaagacatgtgtgcattgtcaggaagaaattttaaaatacccagaaacaaccagtcttctggaagatgaaaggcattttttttttccttgaaaattgtagcatacaaccctaaatcttgaaaacgcattattttggattggttgctataagcaccttcctttggcattcaaattgggcatctaacaactcctacagaacatcagcagcgatatagatgattatgctgaaggtaaaattagtacagtgaagcctgtttcagcaccgacatgcacaaacaggtacaggcgtcaaacctgaacacacacacacacacacacaatcacacacaatggtctttttgttttctttttaatgtattctcagaaagggtgctaagaaattgtcccctttgtcagcttttgatactcactcagtctgaagtatcagaataatcttaccctaaatgcatttctggtttaatactcaattctttgtaaaagaaaattggttcactttttaagagcgtctttttccacaggtgctctaattatttttaagttcatattgatatgatattgtattgcttacgagatgttttaatgcaaattacctatgtaaattatttaagttatgtaccaaacctataaggttattattattattatttatatttctcctgcttgtctttcatcatcacagaagctctattattatttgcatttaaagatgaagacactgagggtctatggaacaaatgacatcctgggacacacttcctagctgtgtgtcccaggataaggcagagctaataagtatatcccagaataagtcacttaccccattgatactctactctgacttcagataatgcaaagagcaagggatttacaaccaaacatgtctgggttgaaatctcaaattcacctaccagctttgtgactttaagcaggtgacttaatctcttggatcctttgttctattatctttaaaatgaaggcaataatagccaaattataaacttttagtaagtattaaataagcaactatatgaagcccttagcactcatcagtgtagagtaggtgctcactgaatggtgctagttttaattcaagtgctcttgattgcagaaaaaaaaaagtcacctatttgatgttgattatctgaggatctacggaagctccaaatattcagtgaaacttttatagtgtaacgtggtcagtgctaaggtgccctgaggctctagggatgttctccctcctcactttatccctaattaaaaactaatgcagagggacaagacttgtgatttcataggccctttggtggtaaggttcatggacttctcttttttttttttttttttttttttttttgctattctggtgacccattcacatatagcatctaatctgtgacttccagcgaagggaaagagtcaattccatactcctgtgatgctctcatttgggactggtgtccaacagagcaggtaaactctgtgagagagtgcatcagatcttgggtaagccagccagcttctctctgttccatgactacagatctcagcttgatgcccagcctatgcaggttgagtatcccttatctgaaatgcttgggaccagaagtgtttcagattttggattttttttcaggtattggaatatttgcatatacttacttgttgagcatgccaaatttaaaaatctgaagctcaaaatgctccaatgagcctttcttttgtgcatcatgttggcacccaaaatgtttcagattttggagcatttcagaattgcggtttttggatttgagatgcttcatctgtacttgcttctggtcatagtgtatgaatgaggtggtgctggacgtttgataaactgaggagtgagttaagtactatcagttgttacaataatggatcaattaattatcaattgtgtttttgactgtaagaaacagaagacccaagtcaacttttattacttgaaggcaaatagttctactgtggtcatggaaaggctactgagcttcttttagttcagttttccaatatcctaaatcagggtaataatgctaccatccttctagatttgtcataatgtttcttactgtaagagattagccttagactccaaagaagtgtgctcaactcctttccccgcctcttactagctacagtaatctaatctaattcttcccgagactcacctgcagaatggaattaacaataccttcctcaaaagatgttgtgagtgaccaataagatttactggtaggtaggattgcacagggggcaataccttgcatcacatcccatacactgatgtttgttgaaattaaatctgacgtctgtatatttagtctcttatctattaaatgaagataagggtacttttctcagaagattgtgatggggattaaatgcaatgatatatgtgaaaacactttaggaactctataataatgtataaaagtaattattagtactattaatctcttataattatttgtattataatattacataaccattatattatttttgtatctcttatgatttctaagtcaatagtatagattcttatttttcatattaaagaattactcatgtaaagaaattgcttagaaataaattttcaaatgttttagtccataagatattgtctagagacacatttattataatataccttaacaaaacagtcatgttttagcatgtaaaattgttgagtgaaataatttttaaaatgtcatttaaagttagtgaggttaaaaattagtgaaataaaataagtgctgcctgtttaagtatttaacagctgcccagcttcccatcacacttcagattttcagcaccaccctatagaagatcttcacctggtactggtgtgtgacttactgctaagtgaagctgcctgcttaggtgaggttgttttggtgtcttttatcatgttagctgttgatggacagcctatgtgcatttgtactctcagataacatttattccttgttgtttttcctctagtgagctttaaaaacaagtcttgtggtgcatttgtctataagtatgcaagtccctgccatagactttttccattatttcctgatgttacccagccctctcagctagaaaccaaaatttactccatcaacaagacatgctttagtagatagcaaaaagagagccatttgcagacataatcctagagtaatatatttcgtatgtgtgttcttttttccccaacccaagaaattactactactggtggttcatctcttatgaaaagaccagcaatcaggccgggcacagtggcttacacctgtaatccagtgctttgggaggccaaggtgggtggatcacaaggtcaggagttcgaaaccagcctggccaacatggtgaaaccccatctctactaaaaatacaaaaaaatagcccggcgtggtggcaggtgcctgtaatctcagctactcgggaggctgaggcaggagaattgcttgaacccgggtggctgaggttgcagtgagccaagactgtgccactgcactccagcctggacaacagagagagactccgtctcaaaaaaaaaaaaaaaaaaaaaaaaaaagaaagaaagaaagaaaaagaaagaaagaaagaaaagaccagcgatctctattataggcagtagggcataatgcatttgaaatatagagtctaagaacttaaattcgagccctgactctggatattctgtatgagttactttgagcacgctctgtctctcagacttaatttctttttctttttcttttcttttctttttttttttttttttttgagacagagtctcgctctgtcacccaggctggagtgcagtggcgcgcaatctcagcttactgcaagcaagctccacctcccgggttcatgccattctcctgcctcagcctcccgagtagctgggactacaggtgcccaccaccacgcctggctaatttttgtatttttagtagagacggggtttcactgtgttagccaggatggtctcgatctcctgaccttgagatctgcctgccttggcctcccaaagtgctgggattacaggggtaagccaccacgcctggccacttaatttctataacttacatttgaattcctgcactgctgctatatctaattaaccatttccttggacaagtcatgcaatccttcttaggctcactttctgttataaaatgagaataaaaatttttcatacttcagagaattgttgggaagattaagtaatgtaaagtttgaaaagtatggtttctggtatttataatagctattgttattaatactatgattattttaatattaacatggtagaatttgataagagatgcaaattgcagttcattattttttctaagactattatctgaggggcaatggatttctctcaggaaactcaaagaaatgcatttttcctcctttaattttagtgagctaaataaaattcatcgtaaaagaacttaattgtgcagataatataatttttatagagacaattctaagaagtacacacatacacaaactaaaaaaaaactaataaatgagagttcagcaaggtggcaggatataagatcaatacatacaaatcaattgtaattctatataatagcaatgaataatttgaaaattaaaaaaataattccctttataatagcatcaaaaagaataaaatatttaaaaataaatttgccaaggcagtgcaagacttttatgctgaaaactacaaaacatggtgaagaataattaaggaagacctaaataaatagaagaacgtcctatgttagtggattggaagactcaaattttaagatggtattactccccagattcgtttacagattcaaaataatccttatcaaaattccagttgctttcttttttttggagaaattgacaagctgatcctaggattcatatggaaatgcaagggacctataaaaaacaaatcaaaccttgaggggaaaaaaaaaaaagaaattggaggattcacactttccaatttaaaaatttactaaaatggtagtatagtactgacataaggtagacatatacagattaatagaatagaattgagaggctagaaataaatctatgcctgtataatcaatctatttttgaccaagatgccaaggcaattcaatgggggagtgggggaatcgccttttcaacaaataatacagagacaactggatatccacatgcaaaagaatggaattggacttctaatttactccatgtacaaaaactaaccaaagtgaatcatagatctaaaagtaagagctaaaagcataacaatctaataagaaaacacaggagtaaatattcatgacctagggttagtcaatggtttcttagctatgacaccaattacataaatgacaaagaaaaaatagatgaaatggatttcattaaagtgaaaaactttttgttcttccaaggacgctattaaaacagtgaaagggggctgggcgggttggctcacacctgcaattccaacgctttgggaggccgaggtgggcagatcacgaggtcaggagttagagacaagcctgaccaacatggtgaaaccccacctctactaaaaataaaaaagttagccgggcatggtggcgtgcacctgtaatctaagctactcaggaggctgaggcaggagactagcttgaacccaggaggtggaaattgcagtgagctgagatggtgccactgcactccagcctgggcaatagagcaagactctgtctcaaaaaaaaaaaaaaaaaagtgaaaggacaacccaccgaatgggagaaaatatttgttaatcatgtatctgataagggacatgtttctagaatacacaaagaatacttacaattcaacaacaaaaagccacagaccgtaactaacaaatgggcaaaggatttgaataggcatttctccaaagaagaaacacaaatggacaatgatcatatgaaagtagactgtcataccattagtcattaggaaaatgcaaatcaaaaccacaatgagatattgcttcacacccactaggatggctatggtcaataagacagccgataacaaatgctggagagaatgtagggaaattggaactctcatacatttctggtgggattgtaaaatggtgtgaccatattggaaaagtttgccagtttctcaaaatgttaaacataaagtacaacatgacccagcaagtttacacctatgtttatataccagaaaaatgatcacataaattcatgcaaaaacctgtacatgagtattcataaaagtattattcatacataatagctaaaaagtagaaacaactcaatgacaatcaacataaacaaaatgtgatatatgagtacaatagaatttattttggtagtaaaaagcaataaagtactgatatatgctacaaaatgaatgaatttttaaaactttaagtgaaagaacccatgcaatgtgtgattcaattaacatgaaatattcagaatgggccactccctgttagttaggagtaaatggaaatggagtttccttttggggtgatgaacatggggtgatagtggtgatggttgtaaactgtgaatatattaaaaaccattgaattggacattttataaatgtaaattttacagcatatgaattgtatcttaataaagcagttatttaaaagggaacttaagcattttgatatttctatggaagtgaaaaagaaaataggttacttcctttccattttcaagagtacaagcaaagtctctccctgtggttatggtggtaaattagcgtgaatcatgtggtgaattagccacatgtcatctttaaaattctccttatccaatattcctagatcatctttgctaattttatattttcttcataatctaaaaacaatactttagtagcattctcaaaagtcattgtattgccagattagattaaatgtaacatatgcaccaatgcctctctcttttctgttcagtccttctcaaaaattatattactctccaaacaacctgagaaaataaagccttttcctgtaagagagttaccttgaacattcactctgacccaaaatattattttcatgaaaatcacttctatttattatgaactagaccaactatcttctttctcattagctgaaaacctccagactggcatttgcttttattcatttataaattaattcatttttcaacaaatatttattgagttcctactttgtgttaggcactacagtaggcactgacaataaagcagtgaaaaaatacagaaatcctctttctcctggagtcacattctagtgcaagggtacagatgatacatataataaatatatggtatattagacagtgatgttgtgagaaaaaaaaagcaaaataaagagagtgctgttgtggtagggtggtcagacaagaccttgataacgaggtgacatttgaacaaggactgagtaagtgtgggagtgagctatggagcaaactgggtaagagcacatgaggcagagagaaaagccactgaaaaattccagaggcaggagcatgcctggcatggtgtagtaaccacaaagggtcactgtggcttcagcagtgtggggaatggggagaatgaggaatgaggaccgtacctaccgtcttggagaccgttgtaagaactttggctgtcattgtgaatagaagggaggccaactggaagatgttcagctggttaacgatgtgtgacctgagttacatttctaaagagttatcttagatgctattttgaaaataaactgtagcaggacaagggcataagaggaagtccagttagaaactgtttttcacaattaagtttcgaccatctgtgtacctgtattattttttacacctgttcctactattgcacaaaatgagtcctgtcctgaggtcagcttctctgagacattgtgaggtcaagaagatgagttatgaggcaaatctgaaataaggaaataaggcatcccttccaggaacacagatccaactaaaatgcaggattatcagcatccagaaggaagataaatgacactgtgccctgaaaaacagacaaaggggagaccattcaaacatgccttctcatttgattgcaaaccaatctttttcagtatgagtcatctacattttactcagaaatccagaatgccaggacccttgtcctctctgttgaatgcctttggagtataatttgtcactctgggaaatgccatcagttcttcagggatcagaggatctttgaacctaatactgttgtgtcgggttaattgtgatttcagtggcctttaagtgctattgtatctgcttagaggccagtcttcctgggccagcggtgaaagtttaaatatacaccagcatgcttagagcagtcaggggagttggcaccaaatctgaaagttgaattcattattccagtcacactgttatttctttgtgtaacatagatattttctttgctctctaatcttctgtgatgaaaaagacctataatctctccagggttttcgcctttgttgtggtctcacatatgtcattcaggaaatctgaccccgtgtgttaggtgttctctcatggtgcactgaatgagctaaacaacgcagaacgagtcagacaggaggttggatagctccaaatgcaatgcaaaccagagaaggggagagaattgtatttgattaatcagatcactgtgaactttggctaaaagaaactccagaacatgctgacatatcaccaggaacagaggagaaaatgcaacatgagaatgaaaacagaggatactgtttaaagggagatatttctgcaatttgggaaactcaaattatttcttttttggaggcatattggaaaaaatcctacacgcatcatgggaagctatcattcagatttggctacagattgattttctcactgatttcttaagcaaactattgacaatgttcctgttgaatgcttacatgttgattgttaagtcatttgtatttatatagaaaattatatttactctgcaatagtaagtggcatgccatcagaaagaaaaataaaaggacaaagagttaagtaataattatgtagcagcaagaacacagggaagataatgaaaatgaactaagtccctaggtgtgggatatgaatagcgtaccagcttttcaggatgttgcacattagttcctcaacaacattcgtggatatggtaggtgttggtgatgctatgaacatcaaattttatctgacagttcaggaatgaagctgggagatggtgttatatttaaaaacactgaataatgagaaattttaaataaaatgtttagggaaaatactatgctttgcaaaattatatgatttttaggaaaaatgcattgagtacatttacacattaaaatttccttaccttttcaaaaattataggagtagcttgtgaattgagtggagtttttctgtaagaataaattatctgtttcctcaggtcaggctaccatctgtgaatgatatttatttttgtctacttgaaatttaaatatgactattttaaaaaagcttttccctgttggattcttactaaaagaaatagaagataatgagcagttatgacaaattgtaaagattttctaactactcctagatatatatttttgtgtggctaatgaatagttgatgagtatgtcttttatcctctttttagagctatcagagagatttaaaatagttcatattgcttaaaatatttctggtgtccatgaactgtgtctccattttgaagattaacacagcaaaaacatggaattatgggtggtggaatgcaaagggtatcacaaactagaaccaagcaataatttgtgtagtttttaaactgatttacccttttgtaatattatagtaccaggtttacatgtataacaaagcagaggagtatggccatacattttaaataggagcattgcttgtttggagattaaactttgaactgctctgaatgtcaaggctttttggagagcagaaatcgtggctggcataatttttgtgtgcagtgcctacctggcatgatactttcgggtggtgttgatgagtaaatcagaaaagcaaagcactcttaattaagagttagagttacttactcttaattttgaacataattaattctcataaatcagtccacaattttgcctgctcacatttttttttctaggattggtagaaaatatcagagacattcaaggaaaaggaatttagaatttttactattcccataaaaagtggaattcaaaagaggattttgagtaattgggtcgaaaatgaaatcttttcttcccattttaataacttaagttgaaggcagtcatgtactttatgggatggaatattagtcttctgtaacaaaatataaaaggaagcatttccttgaaactagaaaacatggggttagacagttaagaaggttcttgttggctttcagacttttgatatataactaatgtcattgtaattttctttaaaaagaatatattaaaaagggaaaaattatttaaatttatctgatcacaaaactctttttggaggtgaagtgcctattaatatctcagtggacctctggaacagcctgggtggtgtgatgttgcttcagtgaaacaaacactgcctagagaaccagatcaatactgttgaaaattacagcttgtttaccagctatataacctcaagcaggcctgagctttaattttcttgtgtgtaaatgagtttataatgcttcccttgaaatattgtgaagattgtgatgtaatatgaagcacccagcatagttcctggcacatatgaagcactcaataaaaactaaacttgtattgagaatgaaatataaaaaaaattgatatgtgactcattgtggtgtttaaatgagatgtaaaagtacttagcgcaggaccttgtccaaagaattaactcagcaaattctagctttctttttaaaaaatttcaacttctgtttaagattcagggagtatatgtgcaggtttgttacactcgtatattgtgtgatgctgaggtttggagtacgattgatcccatcatgcaggtaatgagtatagtacctaatgggttgttttccagctctacccttatcccctgcttttggagtctacggtgtttattattcctgtctttgtgtccatgtgtatgcaatgtttagctcccacttataagtgagaacatgaggtatttgcttttctgttcctgcattaattcacttaggatgatggcctccagctgcatccatattgccgcaaaggacatgacttcattttttcttatggctgcatagtattccgtggtgtatatgtaccacattttctttatccaattcactgtgaatgggcacctatggtgattctatgtctttgctattgtgaatagtgctgtgatgaacatatgaatggatgtgtctttttggtagaacaatttattttcctttgggtatatgcccagtaatgggattgctggattgaatgatagttttgttttaagatctttgagaaatttccaaactgctttccacagtggctgacctaatttacattcttaccaacaatatataagtgttcccttttctctgcagcctcatcagaagtattgttttttgatgtgttgatgatagtaattctgactattgtaagatggtagctcatcatagtttttgtttgcatttttctgatgattagtgatgttgagaaatttttaaaagaattaatttagtaaatatcagcttctttccttttttcatctcctcatcttcacattatgtattatgtataagttggcaagctctttttttggaaatccagatcctttcagttataatatgatgtttaaaggaacttttaaaaattacacttatccattgaaatggttgattcactcatctttttggtatgtacttagtactttctatgtaccaggtactgtgctggcttctggaatctgaagttgtataattatcagatagagtgaacccccaaataaatgaatgattataaatcagcatgttaaaacaattattggtgtgtatacagtcttctttgggcacatggatacacctgtatcagattgggggtaaaggaggtgacccataatcagaattttgatggataagtaggccataagtaaacgaaaatcagaaggaagactttccaggcataatatagcatagcatgactcatcctggagaataactattgatgttctaagacacgagaaggaaaatgattgcttgtgacaacgctgaaaaggcaatagggctggataagccctcaagagaacttcaactttctcctgaaagctgtgagggaccataaagatattaaagcagagacgggcataagccaaaatatggggccaacctggagtcagaaactggtcagggtgtttcccatagaagctaagggtgcttccattgaaatcgaattgtattctattttaagaggaaaaaactcaagcaagtgctgctaaacccgcaagagtctatttgaatttacctatagtctttgaggtggcccaatggcttggactactcttatatggcaatttgcagtgatcaaaatggaacatcacaattaaactgttgaattgttaagtggtaaaatgttttcaagattcaacagctgaaggcttggaagcctgcctagagtatccttataagccctctacctgattaagatttatctgtttttatgtaactcactaagagttaagaataactttttattttctccagttgagctaatttgacttacttgggtttttttgtttgttggtttgttttttgatgcagagtcttgctgtgtcacccaggctggactacagtggtttgatcactgctcactgcaacctccacctcttgggctcaaagcaatcctcccacctcagcctcctgagtagcaggagccacgggcttgtgtcaccacacctggctaattttcatatttttggtagagatgggtttttgctgtgttactcaggctggtctcaaactcctgggctcaagcagtctgcctgccttggcctcccaaagtgctgagattacaggtgtcagccactgcacccaactttacttttttaagttactttacctacaaattttttcctgctgaactacagctaatggtgaattcaggtgagaaaataaaatggaactctacattttcaattacaccacgtcaattaattataggttaacgatcacttaaatgcagtaggggagctaaattttatgaactctaggggaaatccttgagcaaagagaagaattatgtttatagtaaaactacttcttaatttatttgtgttatatgtattcattttgtactacatgattctctaaagcaaggcacacttacatttagtaaatttagtaggtggaattatgtatgggcttaacctaaaacagtgttgcctactatattcatccattctcacactgctataaagaactaccttggccaggtgtggtggctcatacctgtaatcccagcactttaggaggccgaggcgggcggatcacaaggtcaggagttcgagaccagcctgaccaacatggtgaaaccccatctctactagaaatacaaaaattagccaggcgtggtggcacatgcctgtaatcccagctactcaggaggctgaggcaggagaatgacttgaacctgggaggtggaggttgcagtgagccgagattgcactccagcctgtgtgacagagccagactccatctcaaaaaaagcaacaacaacaacaacaacaacaacaacaacaacaacaaactacctgagactgggtaatttataaagaaaagagatttgatttactcgcagttccacaggctaaacaggaagcaaggctaggaggcctcaggaaacttacaatcatggcagaagatgaaggggaagcaaggcgcgtcttacatgatggcaggagagagagagggaggaggtgtcacgcttaaaccatcaaatctcatgagctgtccctcactatcaccagaacagcatggaggaacctgcccctatgatccaatcacctcccacctggtccctccctcaacacataagaattacaatttggattacaattctagatgagatttgtgtgggggcacagagccaaaccatatcacctaccaaggcaattatattagaagctaaattatagatgtgtaaacatttccagaaaccagtaaatacttctttattgaactagttgaaaatccatggagcccaacagagtgtatttgtcactgccaaacactgagaagaagccaagtttcagactctgcaagagctcattttgacaaccattaggttacagtcctatgtgtagttctgttgtgaagaatattttgttagctaaaagaagactcattgctttaattatctaagccagtatgagaaaaattgtgcctgagaccaggtccctgtgatgaaaataaaaccggtaaaatagtaacacttggacaaatccaaatatattatctctgactgttagtccctgatagatacagacagcggaaaacttcattccaatcaacaacttttttatttataaacatttaagactttaaaaaaagtattcttttttgggcaccgtggacatttttcttctcttgagatgtgagccttagcacgtgcagtgtgagtgaaatgcctgtactgtctactttggtgaggacaatgtatgtaacatttgaagaatgacattacttcttcctctctatgctatataatagaactgcatacatcctgctccagcagaacacacacttaaaagtcagtcttgtatgaatcatcacatatttgctctctttagcatggaactatgtattaggagggtacaaaataagtgtggtgcacttgcctcaaatttgggacagaaaaacaaactctttctgttaatgagattatttccatgaaatgtcatgcaaaagattttttaggagaaaaaaagattgataaaggacacattcttattcagtttaaaagctatttagtacttagaagctggttaaaggcagatggctcaggctatcagttcagtagacctaaaattgacctgagagctgatttcaggaagggatgttagcttgctcctaagaccttcctccctgtcagaaatgcagcttcctctttgattgcatagttgactcaacaaaggcaagatttcccacgctgaagacagatgggaaaattccaaggttggaggtcgactggcaagaagcaggcagctaatctaacggatagtgtcttgagagaaccccgcctacaaaaccacagatctaacacagcatgggggctaggcatcgcctaaaatctgcaggtccatccactcttggaacattccctgcctgagatcacagctacccaaagcaagctctgttgtgccaatcacagtgaattagtcagatagctaagacttccctcttaaataatgcagtaatttaattttcttgtgataattagaaggttgaaggaaataaatctcttaactatagccctcaatttattcaaatataagtgcagattatagcacagatgaagctatcatattaaaagataatcaagttataaaactggtatttctatcaaggctatttgtatcaactaattaaaagttatcttttgaattaccatgcctgctgaatcagctttcagtaaataatgctaatgtacttcacataaaatagttctatttaaagtaaactatttcttaaatatatgaattattcagactttgttgtggatggtatgcaaagaaacatcctaatcacaactaatctcacaattaatctttattttccttatgtagcataaaactgcattcacttcttaaatgaacacttattgagagtgctactctcttttgctctctggtcagtggccctggcaatacagtacttactaagaattagtccttgccaggttcctgtctaggttcctcctctaatgggagggacagatatctgccaataagaagacaatctgagaaatggcataaaagggctatgcataaagctgcatgaggtcccgaggagagctagcacctgcttcacagaggaggtgacatttgacttcagtctaacagtgtgacaagggaggcagtccagacagagagaaaaacaaatgcaaatgaatggagacagaaatgggcaggactggctcagagaaagataaaacctacagtatggttatgtgtattgtttatttccgtctccctcttgtcccatgttacccctaccacaaactgggatgtgaacaccatgaaggcaagaaatgttgtctgttttgttaattaatatatgccaaatggttagaatggtgtttagcacatggtaagggctcaatgaatacttgtgaaatgagtgaatgcatatgtgtgtgttagagagagttgtaactgtgtgacttgggacttaggcatatccaggaattcaggtgactttgtagaaataacatctgacaagcgttggtctttgaccctcttacctccttgagaatacttgtcctgaaggaagattttatttgaaaactaataatcactctgtaaactttattctgacagcagcaaagtttcaaagcctaaaagatctcattgtccttgagcagtgtcataagctgcaggcaggaaaagtcaagtttaggttgtgtccacagcgcattgaagccagataataaataatgcagactctgtgacattttaggaaccttagttcaaggatatttactgttaggcctctggtgttttattgatttccaagtaagccacaggaatgccctgaagcctttcctaaaggtgggatcatcatggttcagtaaatagtcaaagctttacaggagtcgatacaggctttggtgggcattgttttttttagtaaaaatctagtgaaattccagtcacatcatcaaaaatcactttctaagatacaaaggaccaagtgttagaattggaattataattcacattttaagataccatcaggtagcctcacaatgcctactattccttaaaaaaaaaaaagaaaagacaatgaaaggagaaaattatgtatacatctcttattctaacttagtatttaataaagctcaggataggtaacatattttgaagttaccaagtaatgtttttttctcttctcccccccaaaaaaagaagtcaaaataaacaaaaatttattatattgtttttaaaaactactttaaatatctactctatgccaatttagggtaccttatacccactactttattcttcataacaatctattagataggaactcttatccctgtattgcatattaaaaacaggctgtggcagtgttaactttttcattttcatgaaaaaaatattgagcagaagctgaatgaaaactcggttccgtgttattctaaaactctttctaccatatgataaataaatacaacttttataattactgatttcttgattgctaatggcagtgattttaatttttaagttgttatttataaagtttataaatatttaaattttagttaatgaatatgtttaaattttcttgtggtctttaaaaacagaaaaatgatatttatttcccaatttatccagagctatttggtgctcttaactaaaaagattttcattgtttacaagtgcaagtcaacaaatttttatggcactcatggtatgggcaaggaggactatataagatatgctgcgtgctgaaaatgttgtaaataagtgaaatatcttcaaggaccttttgattacatttggataatgaaatatacatgctcaatatctagtctatgaatgtcaatcaactgttcagaaaaagatctatcttaactttttttttcttttttttgagacggagtttcaatcttgctgcgcaggctggagtgcaatggcgcgatctcggctcactgcaacctccacctccgggttcaagctattctcctgcctcagcctcctgagtagctgggattacaggcacctgccaggaaggactggataatttttttatttttagtagagacgaggtttcaccatgttggccaggctggtctcaaactcctgacctcaggtgatctgcctacctcggcctcccaaagtgctggattacaggcgtgagccaccatgcccggcccttaacttttcatgactttgattgattcaaagttactgattttttcagtttgtcagccttaccatggaaactcactcagcatatgaatttgtaatctcaaagcaccatcatatagtgaatgagcaacaccaggctatataagtgtctgtgcatatttagaaagcaatgataattttttcctttatttgtcaatggtcagtgcaggctgcatatgagatgggtagcaacacagaaaatgatggagggtaggaagtgaacacagaaacagaagttatgtgaagaagatccaggagagtgagaactactcattgcaaatatagccctctttatgggctgctcaaacatcaaaaatgtatttgaaggaaaaaaaaagtatatcataataaatactcagtcaatataaactaacctatttgttccttactgaatttgcaatgtgtaggatgacacagatgccaatcaatagttgctgaatgatgaatagacaaatggtccaggacattcaggtcatttgaacaattgtagttgtcaataaatgattaattagcttgctgtatagactgctgtaggcttccacctctggcttcactgcaatttctggactgacatggtagattgtacacttcttaaaaacacagggaaccctcagagggtgggaattttaaataagtctaagtgtgattctagaacttctagaatcctttcttacgagttcggaatccaatgcttgtttcttcaatgaaaacaaggtccagggaggaaggaaatggggcctaattgaccaagagtccccctaaagatccatccctattctatagaaaggattttaaaacctcattgacaaggtagattaactgaaataataacttctaatgctcatggattcatttaacatttttcaaacacagcatgccattgtgtgcctgtttagtggaaacagaaatgagtaacatgttaatacttttcaggaattcgcagtcaggtagggaggaagccaacatgtgaacgaatacatgtattgcaatctggtaagtgtctgtcatgataaagtatttattaagaggaattaggagatacgtatggaggaaaggggcagaaaatatgtgaacatgtgaaacaacacagcaagttgaggaaatggaaagattatgacacaggtggatattaaaagtcacatcaggaaagtaaagttagaatgtgaatcaagctacgtatcatatagggtttgttgtgacatgttaaggaacagagttttttcataaagtctttgagaagtcctggaggtttgtaagcagggagtggcatggcacaatttataatttaaaaagataatcatagaaataaagctcaagtcagggaactgttcagaaggctgtagcagtaactcaggaaagaaatgataaaaagacatgaattagggcagccattgccagaaaaagagaaaattaattcaaaaaggcaaaagaggtggaatactccagggtaggtaacaacttgggcagctattcacttgtttatgacactggcaagatttgggccgaccactggcagataaaacagattgcccacagttatgaaggggtcttatttgcttttattgttagtggtagtggtgatcagatgtggaaggcaagaatgattctcaagttgatagcttgatttactctgtggactgagagagagagagagaatgtgtgtatgtgtgtccactatctagcactgtgcctggcactgaaacacaataatacatattttaaaataaatatctgaaactaatagctgtcccatttagagtgtctctgaggtgttttattcatgtgtcatttcattattactgtgcatatgcagagtaattcaaggacatgtctctactaagagatgaagctgggtacaaatctgcatgtaacaggcctcaatgcccatatcaataccattgtgctgagtgacaggaatgatgaatctagtcatggtagaaagtttagggcttgctcagttaggaagttcagacttgtaaataatgtacaagatatttggtagcttgaactgtaatttattgtctgtttcacagctaaatgaatgggagaggatgaaaacaaaacttattgtttaaatccaagtactaaagaacactttagatacccacccttgggtaaatattacccgattggcaagaagtttgttattctagctaacctaaactcttagtgctgacatttaaacacatgttctcttgttcgctcctcattgaaaaagcaagtctcctgcacaatggcctttcatatttctggaacctttttattaatttagaggaatacatatcatatatactgttagctaatgggataacataatgagctgatgatactgtttcttggacaatagacaattactgaagaatattgtttctgtgtttcttacccttggccaggttgactttctacattgaatagctttagattctattgagtgtggctacataatcttgagattgacattggtgttttcacccttatttttactcccaatcttctctctactccactttgtagttattttaccaccagcattgtttgccaacaaatactccagaatgaaagggaagatgagattgcagtcagttccctacttttcactctggttagagtgttctatgcctagctttcctagggaactttaaaaacgaacaaaaatctatcttcagtgcatttattagtttgatttgctatgattggccttggatagccttagtagtttgaagttcccttcttttaaaaaaatagagggaaaaaaagatagagcaaagacctttactttaaataattatattaaatgctattttttttgatttcaatatattattatttactcaggcaagaaagaccattcctcaaaaaagggcttaaaaagtcagtaaataatatgttatgcctagcaagcaaaaaagcagttggctctgcttctttctttttggttttattttgaatgtttttgaaataaatgttaattcgcagagcactagcttccttcctgtcagttgtcacagggtttttcggtgtggttgttgtttgcttcctaaatgatggtaaagcttcgttatatctgtacctatttttttctgaacatttggacatttcttggaaacacgtcagaattcatcatttggctttattattgttttggggaaatataataatttgtttagaatttttatacaaaacatatatagagaatgatctttaataattttttaaagagacattaaagaaaattgctctcctatttaagttaaatgttttagtaagcattctcttatttaattcagttttaattgcattattaattatcatgaacaaaatattgctagggaaaaagctgaagagataatctaattgcagcttttactgctttgaatgataaagtacctttgatttggtgctgagccaggagggcttgattgataatatctgtctcagatgtcaccctgggagaaaagaataaaacctcagtagagttggtgcatagcagctgtctccgctgctccaatttttctgccccattgacgtcattgggaggtttcaaaccagtccagggtgtctagtaaacctgcacataaatgaaatgaagaaacagaaaaacagtgattcatagccccactctcactccaaagaggtggctgttatagcctttcagataatgggcagatgttttctcctttactgaattttaaaaagagaaaaaaatatcatcagctatccagaaatgtgggaaagcctcagacaaggaatgtgaattgcgtaagcccttctgaaatcagattatatcacaatgagccacatttgtccaaagttctcagatatcataacctgtatccagcttgtctttaaagtcaggaatatctgaagcagaatgtggcatgggaaacagctttctttggagacaagactgctctcaccacccagaccagttcccaacaccatttcctccccttctgtcttcacaggcagccttttgtgctgagttctaaatgaggggcccccatagacaatgataggaacacagagtagaattacagtgttttccagtaaagatttttttgtttccttgtttggggatatgtcttttttatcagcttaatacattaaatacatgataaactctaatcctccaaataatatcacaaagaaccatttctaaatgctatcacatagcaatttagggatacagctgagcattaatgataaaatatgttcagatgctaatttttcatctgctgggcaatttggctgctgggagcaaaagaatgttctccttttcccctcccctcatttaacacgagcaatgacaggaaggactcataataactgagtagctttcatttcttatttatccgacaagttccatgaaatacagttgaaaaatacctgaatctgtatagcactttaaagtttgcaaagcattatcactttcactttttccagttgcatttgttagacaaaactataaggcagatgttatatttatcaccatgttttccaatcctgtgccctatcttttgaaatcacttcaacttagcagagacgtgttgaccatttattacatgtggtaaattatttaaggtaaaagatacataagatatagttgtcagtcttagtgagcttagagaactgaggacaaaacaagcatccacacgtaccttaaatcacaaggcagaataacataggtgcataagacaaagtgttggcacctgacagtgggtcttgaatgaagggggcatttcagagcaatattcaaagactgataatgtttcaataggtaaagatgatggatgtggccttcgggagtcaagggacctgcgtgaacagagtcaaataggcaagatgatctgagggatgatgggaatgacacaaacaatgtttggaaactgaaggcagggatctggtgaaaggtaggtcaggctattagtggctgaccctaaatgccagggtgagaagtttgtaataataatgagacatttaaatgctgaagctagggagtaaaacaaatctgtcctttagtaaaatccatcaagcagtcaagtgtaaggtacatgagagaaaagaaaatctggctcatggtgccaattaggaggttccatataaatccagggtagggaggtttgaagaaacagaattataggaatttatttgtttaaaaatatttattgagcatctattatctgccagccactattccagaaatgagaatatggcaatcatagacaaactctctgcctttataggtctttcattttagtaaggaagaaatgaaaagcaaagaaaaattttaccaaaagctatgggttagaaccaacagcacttagtaacaggtagttctggatggaagaagattcaggattaacttagtaatttctctatttgagagaacatatcccttaacctgttagctaaaagtgcacttactctatgaatttagccttcttcacgtgctacagtaacacttcacatggataccacatagcttaaatataacgaggtgtagaagcacacttggcaaagcaccaagtaatacataaatattatccttattagttgtgaatggttgtttttactgtattgttattataagaaaatagtaatacctcagagtttttctttttttttttaactctttaactttattgtgccccagtttacttttttttattgtactttaagttttagggtacatgtgcacaacgtgcatgtttgttgcatatgtatacatgtgccatgttggtgtgctgcacccattaactcgtcatttaacattaggtatatctcctaatgctatccctcccccctcctcccaccccacaacaggccctggtgtgtgatgttccccttcctgtgtccatgtgttctcattgttcaattcccacctataagtgagaacatgcggtgtttggtttttttgtccttgcgatagtttgctgagaatgatggtttccagcttcatccatgtccctacaaaggacatgaactcatcgttttttatggctgcgtagtattacatggtgtatatgtgcctcattttcttaatccagtctatcattgttggacatttgggttggttccaaatctttgctattgtgaatagtgccgcaataaacatacgtgtgcatgtgtctttatagcagcatgatttataacccttcgggtatatacccagtaatgggattgctgggtcaaacggtatttctagttctagatccctgaggaatcgccacattgacttccacaatggttgaactagtttacagtcccaccaacagtgtaaaagtgttcctatttctccacatcctctccagcacctgttgtttcctgactttttaatgattgccattctaactggtgtgagatggtatctcattgtggttttgatttgcatttctctgatggccagtgatgatgagcattttttcatgtgttttttggctgcataaatgtcttcttttgagaagtgtctgttatcttcttcgcccactggttgatggagttgttttttcttgtaaatttgtttgagttcattgtagactctggatattagccctttgtcagatgagtagattgcaaaaattttctcccattctgtaggttgccttttcattctgatggtagtttcttttgctgtgcagaggctctttagtttaattagatcccatttgtcaattttggcttttgttgccattgcttttggtgttttagatatgaagtccttgcccatgcctatgtcttgaatggcattgcctaggttttcttctaggatttttatggttttaggtctaacatttaagtctttaacccatcttgaattaatttttgtataaggtgtaaggaagggatccagtttcagctttctacatatggctagccagttttcccagcaccatttattaaatagggaatcctttccccatttcttgtttttgtcatgtttgtcaaacatcagatagttttagatatgcggcattatttctgagggctctttctgttccattggtctatatctctgttttggtaccagcaccatgctgttttggttactgtagcctcattgtataatttgaagtcaggtagcgtgatgcctccagctttgttcttttggcttaggattcacttggtgatgcgggcccttttttggttccatatgaactttaaagtagttttttccaattcagtgaagaaagtcattggtaacttgatggagatagcatcgaatctataaatcaccttgggcagtatggccattttcacgatattgattcttcctacccatgagcatggaatgttcttccatttgtttgtatcatcttttatttcattgagcagtggtttgtagttctccttgaagaggtccttcacgtcccttataagttggattcctaggtattttattctctttgaagcaattgtgaatgggagttcagtcatgatttggctctgtttgtctgttattggtgtataagaatgcttgtgatttttgctcatcgattttgtatcctcagactttgctgaagttgcctatcagcttaaggagattttgggctgagaccatggggttttctagatatacaatcatctcatctgcaaacagggacaatttgacttcctcttttcctaattgaataccctttatttccttctcctgcctaattgcccgggccagagcttccaacactatgttgaataggagtgatgagagagggcatccctgtcttgtgccagttttcaaagggaatccttccagtttgtgcccattcagtatgatattggctgtgggtttgtcatagatggctcttattattttgagatatgtcccatcaatacctaatttattgagagtttttagtatgaaggttgttgaattttgtcaaaggccttttctgcatctgttgagataatcatgtagttttggtcgttggttctgtttatatgctggattacgtttattgatttgcatatgttgaaccagccttgcatcccagggatgaagcccacttgatcatggtggataagctttttgatgtgctgctggattcagtttgccagtattttactgaggatttttgcatcaatgttcatcaagaatattggtctaaaattctcttttttggttgtgtctctgccagtctttggtatcaggatgatgctggccgcataaaatgcattagggaggattccctctttttctgttgattggaatagtttcagaaggaatggtaccagttcctccttgtacctctggtagaatttggctgtgaatccatctggtcctggactctttttggttggtaagctattgattattgccacaatttcagaccctgttattggtctattcaaagatttaacttcttcctggtttagtcttgggagggcatatgtgtcgaagaatttatccatttcttctagattttctagtttatttgcgtagaggtgtttgtagtattctctgatggtagttggtatttctgtgggatctgtggtgatatcccctttatcattttttattgcatctgtttgattcttctctcttttcttctttattagtcttgctagcggtctatcaattttgttgatcctttcaaaaaaccagctcctggattcattgatttttttgaagggttttctgtgtctctatttccttcagttctgctctgattttagttatttcttgccttctgctagcttttgaaagtgtttgctcttgcttttctagttcttttaattgtgatgttggggtgtcaattttagatctttcctgctttctcttgtgggcatttagtgctataaatttccctctacacactgctttgaatgtgtcccagagattctggtatgttgtgtctttgttctcgttggtttcaaagaacatctttatttctgccttcattttgttatgtacccagtagtcattcaggagcaggttgttcagtttccatgtagttgagtagttttgagtgagtttcttaatcctgagttctagtttgattgcactgtggtctgagagacagtttgttataatttctgttcttttacatttgttgaggagtgttttacttccaactatgtggtcaattttgcaataggtgtggtgtggtgctgaaaagaatgtatattctgttgatttggggtggagagttctgtagatagctattaggtccacttggtgcagagctgaattcaattcctgggtatccttgttaactttctgtctcgttgatctgtctaatgttgacagtggggtgttaaagtctcccattattattgtgtgggagtctaagtctctttgtaggtcacacaggacttgctttatgaatctgggtgctcctgtattgggtgcatatatatttaggatagttagctcttcttgttgaattgatccctttaccattatgtaatggccttctttgtctcttttgatctttgttggtttaaagtctgttttatcagagactaggattgcaacccctgccttttttgttttccatttgcttggtagatcttcctccatgcctttattttgagcctatgtgtgtctctgcacatgagatgggtttcctgaatacagcacactgatcggtcttgactgtttatccaatttgccagtctgtgtcttttaattggagcatttagtccatttacatttaaggttagtattgttatgtgtgaatttgatcctgtcattatgatgttagctgggtattttgctcattagttgacgcagtttcttcctatcctcgatggactttacaatttggcatgtctttgcagtggctggtaccagtttttcctttctatgtttagtgcttccttcaggagctcttttagggcaagcctggtggtgacaaaatctctcagcatttgcttgtctataagtatttcatttctccttcacttatgaagcttagtttggctggatatgaaattctgggttgaaaattcttttctttaagaatgttgaatattggcccccactctctgctggcttgtagagtttctgccaagagatcagctgttagtctgatggtttccctttgtgggtaacctgacctttctctctggctgcccttaacattttttccttcatttcaactttggtgaatctgacaattatatgtcttggagttgctcttctcgaggagtatctttgtggcattctctgtatttcctgaagttgaatgttggcctaccttgctagattggggaagttctcctggataatatcctgcagagtgttttccaacttggttccattctccctgtcactttcaggtacaccaatcagacgtagatttggccttttcacatagtcccatatttcttggaggctttgtttgtttctttttattcttttttctctatacttctcttctcgcttcatttcattcatttgatcttccgtcattgataccctctcttccagttgatcgaataggctattgaggcttgtgcattcgtcacgtagttctcatgccatggttttcagctccctcaggtcctttaaggacttctctgcattggttattctagttggccattcatctaatttttttttcaaggtttttaacttcattgccatgagttcgaacttcctcctttagcttggagtagtttgattgtctgacgccttcttctctcaactcatcaaagtcattctccatccagctttgttccattgctggtgaggagctgcattcctttggaggaggagaggtgctctgctttttagagtttccagtttttctgctctgttttttccccatctttgtggttttatctacctttggtctttgatgatggtgatgaagaaatggggttttggtgtggatgtcctttctgtttgttagttttccttctaacagtcaggactctcagctgcacgtctgttggagtttactggaggtccactccagaccctgtttgcctgggtatcagcagtggaggctgcagaacagctgatattggtgaacagcaaatgttgctgcctgatcattcctctggaagttttgtctcagaggagtacctggccgtgtgagatgtcagtctgcctctactggggggtgcctcccagttaggctactcgggggtcaaggacccacttgaggaggcagtctgtccattctcagatctccagctgcgtgctgggagaaccactattctcttcaaagctgtcagacagggacattgaagtctgcagaggtttttgctgccttttgtttggctatgccctgcccccagaggtggagtctacagaggcaggcaggcctccttgagctgtggtgggctccacccagttcattcttcccagccactttgtttacctactcaagccttggcaatggcgggcacccctcccccagcctcgctgcctgcaaccttgcagtttgatctcagactgctgtgctagcaatgagtgaggctctgtgggcataggaacctctgagccaggcgtgggatataatctcctggtatgccatttgctaagaccattggaagagtgcagtattagggtgggagtgacctgattttccaggtgccatctgtcacccctttctttgactaggaaagggaattccctgactccgtgggcttcctgggtgaggcgatgcctcaccctgctttggctcatactcggtgtgctgcacgtgctgtcctgtacccagtgtccaacactccccagtaagatgaacccggtacctcagttggtaatgcagaaatcacccgtcttctgcgtcactcacgctgggagctgtagactggagctgttcctattcagccatcttgactccaccccctggagtttttcatttggtaaattgtttctcattttaattatttgaaagcaaagagttgaaatatatttatattcattatgtgtcttcaaataatctcagaaaagtttggaccttaccttaccatataatcttttgattttgttgctgctgtgatttctgcttacatgttagtgtagtatacattatgaaaaatggtatgtattgtctagggagctcctaaaacttgtatctaggactccagtacctaatggagaaagaggtcaattcagcaaagaatgtgttttatgtattgataaattttgtgagctacatcctcataagcatttaatactttaaacacttaagcatcttctttgaggttatttatgtgaatgatttattagagagtttaggttatttctcctatacattcacaagtctcataacatttaaaagactgatctgttgctcctgttattagtaaaattcattttacaatgtatatttaaaaattagcagaaattaaaatcttaattcacatcaaagtaaatgtgagccacataatcagattactgtcgagtcaatagactacctagggttatcaataatgaccctacttatgtgtctgcctttttgtcaagttaagaataagaatctacatgcaagtggaaggggagaatcgagagcgttacctagataattgtctttaaggagtattagtcccttttcacgctgctgataaagacatacccgagactgggtaatttataaaggaaaagaggttgaatggactcacagttccacgtggctggggagacttcacaatcatggcagaaggcaaaaggcacgtttcacatagcagcagaccagggggaatgagaaccaagcaaaagggaaaacccttataaaaccatcagatcttgtgagacttattcactaccttgagaatagtatgggggaaaacaccccatgatttcaattatctcccacgggtccctcccacaacacttgggaattatgggagctacaattcaagatgagatttgggtggggacacagccaaaccatatcagaagtctttttaggaaaaataagatgataataaaatgaacttcttacattgataactatccctgatgtactaaaaaaggcttacttggtaagtatttactaatatatatgtgtatgtctagggccttgtgtccaaaactgttctatctctctctctctgtgtctctttgtatcaattgaagactcttttgtgatcctttctacccaactgaagatcaggcagataagcaaataatttgatcagtgacttctttttgcctataaaattttaatttaaaaaaaccatttggtaatcataatcccctgttgtcttttcacttagaatttagactcaaccgaactgatctcaatctctgacaagcccttcccaattctgcccactgcccttctgcatcctcctagctcttctcactgtactgtccttactgtttgcttgtccatatcatgctgtgcttacctatttatatgattctttcacctcttggccatgaaaccccggaagatcatgactgtttccttcatatttatacccattacccctagcggagtctcagtcacctgtgaggttctcaagaaatataggaaatatccgttaaagtgaatattcttttgacaatggagacatggctttcatggtttcggggaaaacttttattgtcctaaaaaagagtccctttatcctttatgccaaatacaaaggctgtatctctcatcaagtcttagggtaatttctgagtcttgagacatatggcaattaataataataataatagcaggagcagcaacagtttactgagcacttggtgtttgccaggcctgtgttaagcaccaaacatataatcatacctcagtctatctatattttgcagatgaagaaacaaaaagtttaaggtacttgcccaaagtcacacaaatataaagacttggtaaagtcaagattaacccaagtttttctgccattaaagcctacttttaacagttatgaagaattgctaaattgacacataacaaatccatttaaaaagatatggattttatttgtacacagagctggaatatgtctgtcagtgtgggaaggtacctgacttcatgatcatatatggaaagaaagtaagatgtttccacaagaaaggaatttcatgttgtttgtctagtcctttaaacatctggatatattttgaaactaattttttaaactgcctttggtttgagtctttgaaaatgaaaaatatattttatgaagcagtcactgttcagggagccaaaatacttgaattctaatctcaactttgtattttaccaaaccagattcctgaaacatcctaggctatttcttggttgtcaaatcaatgatggaatgatattgtaggttcaccatatcccgttccttcctgttcctctagtgtgcttcacttacttcggagaagtcactgaagaccaatttcaaattatttttggtgagaaaaagcctgagacctgtgagggatacttcagggaaatgttatcatctcagagctttaaaataatcatctcccctgggttctccgtggtttggaattcttatgaagcttaatgcgtgaaaaggacaacagttttcaaaatgttggcagtttcctacatttgaccttttaacatttagaaacattggtcaaggtatgtttaaattctttaaattgtagctgacctttggagaaataaacataaattaaggttattacctacatggaatgcttatatggaactattagcaaagtaaaagtagtacgttaagtacaccatggaaaaatgcttttagagactgaaatcattatagtgatagagtcactgagctggaaagaaacttgggaagccatctagttcacccttctgtctgaggccatgtcacatttgaaccataacaagagatttgaaatctttttttttttttttgggagattcaacaacttctcttggtatctagttctagtaactgacaatctcacctgtcagcaagtcgtttttcatagctaacctaaatccctagggctgcactttgaactaactcactttcttctgttcttagatgtagaaaacagctcacataatgactccttttgcacaggaagattgctatcaagatgttattcagctctcatcctaaagccaaattccctgaacctttcttcacaatttctttgtgtctaaccttttagtaacttaccttttgcacatatggctctacccaagtcttcatcttctcaattgtgagacccacaatactatctaatagcatacttagctattatactcgatgaattgcttagttgaatatgctatgttaacatcataacttggatgctgtttctgtttaacaaaacatataatgaaaacttttcctttaaacaatagaaacagaaaacattgtattgacagcaagaaaggttacaagggtgtccatcgccttaaaattccccaatttataaaaatcatggactaaaaatgaataaattaaggaagataatttaacaaatgtttataactcctttacatttctactccatgctgagcagaaggttaatgaagtaaaataagttttggtatcaaacaactccaatttcgtactccatgtaactggacttaatgagcaagtatattctaatttctaaggtttattggcctgatcttgcagaatatgaaaataataaaaaaggtgagttccttgaggacagggtcattcttatttatttttgtatctatgtgagttccttgaggacaagggccatttcttatttatttttgtatctctagggccttccccaattcataacagagattaacactcacttatgtttgaattttactgaaaggttgctcgtgagaattaaatgagattatatatgtgaaaatatttggtcagctgttaaactctatataattgtgagtcattaccattagtaattttaaaagagtgatgattagtaatgagtttttaaaaattaaaccaaactttggtttacagctgtctttccaggaacatttgttattcatttgttgcaaatctacacatgagtttcctaaaattaataatcagtggtacaaagctggccatttggagtttaatgcttagactcttttgagcaaaatgagaatgacaagcgaactcagatgtgaccaaggtgacctcccagagccaatccaaattcactctggcaccagatgaataggactaccctgaaaaatttataattttccagagcttccatgaccttgtgttcatttccctatgtgggagagaaaaatcagtggtatctttgactgacaatagcacccaaaggtttaaataacattgcttcatttattaacaacatgactaaaaggagtctttaagtacttgaccttctttcatggggaacagccaaagggccagaggaatacacggacttaaaaagcagtgtttatgaataatactttagatctttctaaagagcaccatcccctgttttgctatttggtttacaaatacttagtttaagaaagaagaactttggaatcaaagtagttcagattgagatcttagctctgctatacaagtaggtccttgggacaattacttagcttttctaacctcaattttgctttctgtaaaatggaaaatatattacctagctcataagtttcctggcactgttgggttcttggtaacttcattacctcctacaccttctgatctccttcttcacctattttgttagtggcagttggctggctgatatgatttacaaagctagtatgtccaatgtatatgagacccctgcaagaagcagcaaaaactatttgataaacattttattgaatttatttccaagagtggtattgattgcatgataatgacacaaagctataaacctccttcttcacctattttgttagtggtcgttggctggctgatatgatttacaaagctagtatgtccaatgtatacgagacccctgcaagaagcagcaaaaactatttgataaacattttattgaatttatttccaagagtggtattgattgcatgataatgacacaaagctagaaacctcagagaatgtattgctttttgaggaattaacttaaaactagaaaaatacagctttaaatgtaaaaattgactagcctgccaagggcaaatagcataggaaggagttctggaagggcaactggcggccctgggtttaggcccacctgtgccacaaactagaaaaccctggacaagtcacttttcttctctgaactttacttgcttcatctttaaaataggaggatgatgccctaggcctttttctgcatcaacagtctacagagctgagagtcaagcattgatactctcccaaacagatgctgcctaggcacagaagggttcaggctccatcttgttttgctgtcaaaccttcaaaaagtgaggactgtggcctttaggccagcacatctctgtagagaaaacatcagttgccccactgtgaagattctgaaggcagtttggtccctcctcccccaatttattttctagatgaagaacatgctatctcatttagtgagaaagtttgtcacaaaaaagaaaagtcagccataaaaaatgatgagttcatgtcctttgtagggacatggatgaaattggaaatcatcattctcagtaaactatcgcaagaacaaaaaaccaaacaccgcatattctcactcataggtgggaattgaacagtgagatcacatggacacaggaaggggaatatcacactctggggactgtggtggggtggggggaggggggagggatagcattgggagatatacctaatgctagatgacaagttagtgggggtagcgcaccagcatggcacatgtatacatatgtaactaacctacacaatatgcacatgtaccctaaaacttaaagtataacaataataaaaaataacaaaaaagaaacataagagctcaggataaagaaaataacaaaattggaatgcaaaccataccaatttgaaaacaggcaaataatttattttgctaaatcaaatttcagagattgaagtctggatctgtttatgttgccgcagtccctcttgaaattaccaaataggagtatcactcttggtaatttaatttttatggagctggaaggtgtagatatttgtgaatctcccacttaaggcctaaattagatttcttcatttagaataagaaatatgtttaaaaagcatacattttatttttttctccacgttttctgcacctgaaaagggatcgtgtctaattgtatgctcagcttagagccatattcttggcttaacagagataaatcaactcactccactaaactaaaaggcaaaataacttatagatgttaatctctcatagcttgcagcagtctttcctattattagagggagcaaaaaaaatcagccagagacacacatgatatttatacgtatttaaaacggaatattcaggaatgttgtttctcacagttaaacctgtgctgaaatactttacagatatgcaacttaaactacagtgaaaaaccatctttgctgttttcctgtgtgctgatgagaaagaatatacatctcaaagagtagtggtttcttcaaaatccccaatctacatcttggaactctattctgtgcaaattcatttctcctcaaagatgaaaataaataaacttatttaagacttaagggtaaggcaaacaaaaaatgcatagacaaaatttagaatacctaataatctgggatttaacctgaaagtctttaaaatgcactagcatttaatttgagagagagaaaaaaaagaagaccctactgctgtatatttctgttcaaaatttactgctgtttctctggaatagaaaagaagcagtttctgttgagttggcaaattaatgtgcttgaacagaataaagagagcaggccaaggaaatcacactgcttttaatactttctttgcaaagagcttttttggaccaagtccatgactgctacaagtaagtactcagttgcaagaagaatgtgagtagagatcaagtaggctggagctttttgttaattcactcttaatgttactaatgttaatttgaatctggagacttaagatcaaaccaagcggctaatattctgcaaggccccgttccctttcctagtgattcctgggggtagaaatcatttcttaaacctaatataaaaatctactcttctgagtgattgcaaaatagctggtgttagagttctgtatcttacctttctattcacttattatgtgcacagctactttttaaaatattttttctatttataaaagaagtgcataaccatcatggaaaatttataaaagtaacaaaaaacataaacaaaaaaatcatttgtatttgacaaaacattcataaagcatagtcaagctagataagcaaaaagtggcatttattttaagtataattcatcttagagaaactacaatagaaatacatgtgtttccaaagcctcaaagactgttaagattcacttggggcctctttctgctcctctctgcacttctcctgtgtttttattttattttattttattattattatgctttaagttttagggtacttgtgcacaacgtgcaggtttgttacatatgtatacatgtgccatgtcggtgtactgcacccattaactcgtcatttagaattaggtatatctcctaatgctatccctcccccttccccccaccccacaacagtccctggagtgtgatgttgcccttcctgtgtccatgtgttctcgttgttcaattcccacctatgagtgagaacatgcggtgtttggttttttgtccttgtgatagttttctgagagtgatgatttcaagtttcatccatgtccctacaaaggacatgaactcatcattttttatggctgcatagtattccatggtgtatatgtgccacattttcttaatccagtctatcgttgttggacatttgggttggttccaagtctttgctattgtgaataatgctgcaataaacatacgtgtgcatgtgtctttatagcagcatgatttatagtcctttgggtatatacccagtaatgggatggctgggtcaaatggtatttctagttctagatccctgaggaatcgccacactgactgccacaatggttgaactagtttacagtcccaccgacagtgtaaaagtattcctatttctccacatcctctccagcacctgttgtttcctgactttttaatgatcgccattctaactggtgtgagatggtatctcattgcagttttgatttgcatttctctgatggccagtgatgatgagcattttttcatgtgttttttggctgcataaatggcttcttttgagaagtgtctgttcatatccttcgcccactttttttgttttgtttgtttgtttgtttttttcttgtaaatttgtttgagttcattgtagattctggatattagccctttgtcagatgaataggttgcaaaaattttctcccattttgtaagttgcctcccattttgtaggtttctcccattttgacacgatcccttttcaggtgcagaaaatgtggagaaaaaaataaaatgtatgctttttaaacatatttcttattctaaatgaagaaatctaatttaggccttaagtaggagattcacaaatatctacaccttccagctccataaaaattaaattaccaagagtgatactcctatttggtaatttcaagagggactgcagcaacataggttgatggtagtttcttttgctgtgcagaagctcattagtttaattagatcccatttgtcaattttggcttttgttgccattgcttttggtgttttagacatgaagtccttgcccaggcctatgtcctgaatagtattgcctaggttttcttctagggtttttatggttttaggtctaacatttaagtctctaatccatcttgaattaatttttgtataaggtgtaaggaaaggatccagtttcagctttgtacatatggctagccagttttcccagcaccatttattaaatagggaatcctttcaccatttcttgtttttgtcaggtttgtcaaagatcagatagttgtagatatatggcattatttccgagggttctgttctattccattggtctatatctctgttttggtagcagtaccatgctgttttggttactgtagccttatagtatagtttgaagtcaggtagcgtgatgcctccagctttgttcttttggcttaggattgacttggcgatgagggctcttttttggttccatatgaactttacagtagttttttccaattctgtgaagaaagtcattggtagcttgatggggatggcactgaatctataaattaccttgggcagtatggccattttcacgatattgattcttcctacgcgtgagcatggaatgttcttccatttgtttgtatcctcttttatttcattgagcagtggtctgtagttctcctttaagaggtccttcacgtcccttgtaagttggattcctaggtattttattctctttgaagcaattgtgaatgggagttcactcatgatttggctctctgtttgtctgttattggtgtataagaatgcttgtgatttttgtacactgattttgtgtcctgagactttgctgaagttgcttatcagcttaaggagattttgggctgagacagtggggttttctagatatacaatcatgtcatctgcaaacagggagaatttacttcctcttttcctaactaaataccctttatttccttctcctacctaattgccctggccagaacttccaacactatgttgaataggagtggtgagagaggacatccctgtcttgtgccagttttcaaagggaatgcttccagtttttgcccattcagtatgatattggctgtgggtttgtcatagatagctcttattattttgagatacatcccatcaatacctaatttattgagagtttttggaatgaagcattgttgaattttgtcaaaggccttttctgcatctattgagataatcatgtggtttttgtctttggttctgtttatatgctggattacatttattgatttgtgcatgttgagccagccttgcatcccagggatgaagcccacttgatcatggtggataagctttttgatgtgttgctggattcggtttgccagtattttactgaggatttttgcatcaatgttcatcaaggatattggtctaaaattctcttttttggttgtgtctctgccagtctttggtatcaggatgatgctggcctcataaaatgagttagggaggattccctctttttctattgattggaatagtttcagaaggaatggtgccagttcctccttgtacctctggtagaatttggctgtgaatccatctggtcctggactctttttggttggtaagctatttttattgccacaatttcagaccctgttattggtctattcaaagatttaacttcttctttgtttagtcttgggagggcgtatgtgtcgagtaatttatccatttcttctagattttctagtttatttgcgtagaggtgtttgtagtattctctgatggtagttggtatttctgtgggatctgtggtgatatcccctttgtcattttttattgcatctgtttgattcttctctcttttcttctttattagtcttgctagcggtctatcaattttgttgatcctttcaaaaaaccagctcctggattcattgatttttttgaagggttttctgtgtctctatttccttcagttctgctctgattttagttatttcttgccttctgctagcttttgaatgtgtttgctcttgcttttctagttcttttaattgtgatgttggggtgtcaattttagatctttcctgctttctcttgtgggcatttagtgctataaatttccctctacacactgctttgaatgtgtcccacagattctggtatgttgtgtctttgttctcattggtttcaaagaacatctttatttctgccttcattttgttatgtacccagtagtcattcaggagcaggttgttcagtttccatgtagttgagcagttttgagtgagtttcttaatcctgagttctagtttgattgcactgtggtctgagagacagtttgttataatttctgttcttttacatttgttgaggagtgttttactaccaactatgtggtcaattttggaataggggtggtgtggtgctgaaaagaatgtatattctgttgatttggggtggagagttctgtagatatctattaggtccacttggtgcagagctgaattcaattcctgggtatccttgttaactttctgtctcgttgatctgtctaatgttgacagtggggtgttaaagtcttccattattattttgtgggagtctaagtctctttgtaggtcacgcaggacttgctttatgaatctgggtgcgcctgtattgggtgcatatatatttaggatagttagctcttcttgttgaattgatccctttaccattatgtaatggccttctttgtctcttttgatctttgttggtttaaagtctgttttatcagagactaggattgcaacccctgcctttttttgttttccatttgtttggtagatcttcctccatccctttattttgagtctacgtgtgtctcggcacgtgagatgggtttcctgaatacagcacactgatgggtcttgactctttatccaatttgccagtctgtgtcttttaactggagcatttagcccatttacatttaaagttaatattgttatgtgtgaatttgatcctgtcattatgatgttagctggttattttgctcattagttgatgcagtttcttcctagccttgatggtctttataatttggcatgtttttgcagtggctgataccggttgttcatttccatgtttagtgcttccttcaggagctcttttagggcaagcctggtggtgacaaaatctctcagcatttgcttgtctgtaaagtattttatttctccttcacttatgaagcttagtttggctggatatgaaattctgggttgaaaattcttttctttaagaatgttgaatattggcccccactgtcttctggcttgtagagtttctgccgagagatctgctgttactctgatgggcttccctttgtgggtaacctgacctttctctctggctgcccttaacattttttccttcatttcaactttgttgaatctgacaattatatgtcttggagttgctcttctcgaggagtatctttgtggcattctctgtatttcctgaatctgaagttggcctgccttgctagattggggaagttctcctgggtaatatcctgcagagtgttttccaacttggttccattctccctgtcactttcaggtacaccaatcagacgtagatttggtcttttcacatagtcccatatgtcttggagactttgttcgtttctttttattctttttttctcttaacttcccttcttgcttcgtttcattcatttcatcttccatcactgataccctttcttccagttgttcgcatcggctcctgaggcttctgcattcttcatgtagttctcgagccttggctttcagctccatcagctcctttaagcacttctctgcattggttattctagttatccattcatctaattttttttcaaagtttttaacttctttgccattgatttgaatttcctcctttagcttggagtagtttgatcatctgaagccttcttctctcaacttgtcaagtcattctccgtccagctttgttccattactggtgaggaactgcattcctttggaggaggagaggtgctctgctttttagagtttccagtttttctgctctgttttttccccatctttgtggttttatctacttttggtctttgatgatggtgacgtacagatgggtttttagtgtggatgtcctttctgtttgttagttttccttctaacagacaggaccctcagctgcaggtctgttggagtttgctagaggtccattccagaccctgtttgcctgggtatcagcagcggtggctgcagaacagcagattttcgtgaaccgcaaatgctgctgcctgatgggtcctctggaagttttgtctaagaggagtacccggctgtgtgaggtgtcagtctgcccctactgggcagtacctcccagttaggctgctcgggggtcagggacccacttgaggcagcagtctgcctgttgtcagatctccagctgtgtgctgggagaacctctactctcttcaaagctgtcagacagggacgtttaagtttgcagaggttactgctgtctttttgtttgtctgtgccctgcccccataggtggagcctacagaggccggcaggcctccttgagctgtggtgggctccacccagtttgagcttcctggctgctttgtttacctaagcaagcctgggcaatggcaggtgcccctcccccagcctcactgccaccttgcagtctgatctcagactgctgtgctagcaatcaacgagactccatgggcgtaggatcctctgagccatgtgcaggatataatctcctggtgtgccgttttttaagcccattggaaaagcgcagaattagggtgggagtgacccgattttccaggtgccatctgtcaaccttttctttgactaggaaagggaactccctgaccccttgcacttccagagggaggcaatgccttgccctgcttcagctcgctcacggtgtgctgcacccactcttctgcacccactgtctggcactccctagtgagatgaacccagtacctcagatggaaatgcagaaatcacccgtcttctgtgtcgctcatgctgggagctgtagactggagctattcctattcggccatcttggctccaccctctcctgtgttcttaagtattttggtagttcagccttttccaacccatgtgactgaaagcatggccatgcctaagttttagaatttatggctcatctatgcagagaaaaacttaagcattatactctctctcctttcatacttagattatttagaaagagactcatgggcccaactgaggtcaatagcccaccctagcacagtcatatacagcacaggctggggcagaacagtaaaatgtcaagacatagttgcttctactctactcaagtggcctagggaatggggacaaacttcctcaaagaaagaggctgagcaaactttgtaataaatctcccttttaaacttgggatttcttcacccagagataactactgataacatttatatattttttcttctgattttctctttgagcttatgtattctttaatgctgttaaggtaattctgtttgtaattttgaatctagctttttccaatccatctttcttcattagccctcatccatagtttacttttaacaataataactacaaagtaacagcagtgacaataggtagtatgtagcaagtgctgcattgctgttaagaactttgcattatcttattcactctcacaatagaataatatatattaaacctgttcacagtttgctatggcttacaacacactttcatagatattccatttgatcatgccaacaatgttgtgaaagatggcattataattcatttccctttttatgtctaaaatagattctgtctgtgctagaaaggaacattcactaaaagttatacaactagtgaatggtcctctctagccagattttaaatcctgtttccttgagctcatgccctgttgcctcccctggcatttttctgcattcaggtagactgctcagctgttctccatcatcttcatttatgcagtcctgcccctccccttgccagggactttctagacactcacagtgactatagggacaaaaagggaaggtggagaggtgcgctgaagcaatgtgctaggaatcaggggtttctacactatgatctcccaggacactcatggagtggcgatggaagtgtggcttccaagttgtcagacacagtctcttttccctcagaacctgtactgctcctcaccatggcctgccactgctaggcactctcggacctggatattttctctcagggtcacctttttttcttcttccaatccagtttccttcagggaaacttggaatttaccctacaggagtgatattcaattatgagctagcttcagaagatctaccggaaagcttctgattcagtgtccctgaacgttcagcaacaggagagtgtctaggctggagcaaaaagagaatctctagcggggggatacagcctaactccaccctccagcattttatcccagatatagcacaaagaccaaagattagaggtaatctgataatcttgaacaggaaggtagaggaagcagcaagaaggtagaagacttggttaggctaggtataccaaacattctgtattacttcctattttaaaaaaattctttgggtgggataataagagatactgtaaaacgtggatcacatactataatgaccttcattcattttgtaagcagttggcttggttcagaaatgtgcttgccaataataagttgcaggtaaggaaactagtaagtgacagaactgggacctaaaccaggtgatctgggtgtggcttgagtggacgtgggcagccagtcacccatggaacacagagtatggacctgacatcattatgtgtggaagttcagagattgcatggtccactagctcaggaacaggtttcatttgtctttgaatccctagcatgtaagttaaacaaactgcagatatattattagggtcaacatgaggaaaattctgcattacagcccagcttatcatggactgattacttctgctgccctttagtgctgtactgtttgttttccccaggcaaaacatccaaggctgagtccacttggtgaaagattaccaaatcttgtactgaaaggaaatactacatttcccctgtaaatagtaatggaactgactaaataagcccaacttatatggcaaaatttttcaaattcttgaatcaggctgaggtaaatggagttaaaagattaggattttatttttgtttccagagtaacttgtttatactcatgctgtttctttatctattatatttctagtcttcaagtgccattatttcttacaaatcatatgtaaatttataatgatattgttataatattcattaattaaaactcactagcaagattaaagccaatttcttaatgcaatttatagtgttaacaaagatttcagaaactgaaccccaattatttacatagatgatattttgatgttgtaaatatttatgacccatgggtcactgaagatataaattaatttcccatcagttaagaccagcagtttaaggcaaatgaaaaacattttcaaaacaggaatttattgtatttttaataatagctcaactttattgctaacctcgttactggcaagaacttgagagacaaaatcaaatttgggtttctttctaaaattttttaaagttactgggaaacatagtctgtttaatttctcatatgatacacaaaggggaaaaaaactattctaggatgtagtcccagtcgtaatggtgagtcattggctgcagcagtcataatgatagaggattctatttattgctgttctctaagcctcacacaatgaagccaggcagaaattatataattattcctcctggatggatcttctcattcgtttgtaattacaaaatactctttgagtacttttatatcctgaaattaagtcttcagaattgcagaaagaaccgtaaggtttgatctcaggcttgtttatcctccttatattttattttgccaattaatagtgtagcttcccaggtgctaaaatgtgacttctttatcttttgtgtggctcaattacttagactaattttaaataaatcctaagggaaacctcttattttcacaattacatggtatatttttccactgcttataacttcttcctgtatcaattaagtagcttaagttgctaatgttccatgctctctaggtgtgcctctttcaatatttcctgtccttttcgccactgctcataaatggtttctaatcattcttataattgtaccttcttggagccttgagagacaggcacaggttctcttacataggctattattgatattggttgcttttattttccctccaacccccactccagataacaactgttgagtgcgtaccatgtggcaaacaatgggaatgaagagattaatgagccctcaaagaattcatgatttacgtagcacatacttctagctaactgttctagctacaccagccagttctagagaggtacccatggaggttttggatatgtgcttaactccttgaagattcttctggaatgatgcctaaagtaattgtcaagagaagctatgctaatcttcctcttcagaatattcccatttctttcttagttataggtatgaggagtctaaaatatgctttaacatagtaagcttattgttataactggaaccatgcaaaatcttaatttcctataatataatttcttgctcctccaaagtcattcaaatattaaattggacttattctatatgttgcttagtggaaaggtatcacaaataaaaagtgggccacaatgagtaggtcaattaaataaatgcaaaaaatatattgatttattaattacaatataatactgtgctaaatgcttagcttgcattatctcatttaattcttaccaaaactctttgaggtgattattgtatacactcccatttacagatgaaaaactgaggtttaaggaaaagatgtgtatgcccaaatttcttaatgactaaatggcagcagaccaggactgtcttgactacaaagaacatgttctaatactgtacagcttcagactccttcatgagagctgtgatgctcaataatatatgtcaggatatgaatacttagactcatgccagaccatgtcataagccttagacctttttcatttgtgtttatagatagtgaccttttagtgcagtgacaatttcttaccacacagcaatctgcatgcaaggaattgctaatatctgctttgctcagaaggaagcttgtatgtagcattaattatggcaccattaatccattcagttatttattgaaactattatttgttgagtttctgctacatgcttggaagtttcatgtgttatctcctttaaactcactgtaaaaggcatgaggataccaattttctatatctgcagtaattttcccagggttacgtagctcctaactggatgtagtgtcttggattcagacccagctgtttgtctccgaagtctataccaaactaccctggtagtttagagcttatgtttaccagaaatttatgtcccaccagcacgtaatttttaaaccaactctgttgaggtataatttaaataaatgaaatgcacatgttttaagtgtgatacatttggtaagatttgattatgtatatacccttgtagctaccacccccactcaaattatacatttccatcactcagtaaattgctttgtgcccttttgcagtctctcttactccttgccccaggctaccattgatctgatttccatcactgtagactagtttttccaattctagaagttcatataaaaggaatagtacagtatatactcttttttgcctgattttttcacttaatgtaaagttttgtgagattcatacatgttgttgcctattcaatagttcattcttttttattaccaaataatattccattatatcacacatcacatttgtttttccatttgtctcctgatgtgtatatggttgtttctagtatggggtgatgttgaataaagctgctatgagcgttcgtatcccagttttattggctcatccactgttgtccaaaagaatttcttgaactctgcatttgtcctgaaggattctctgattgttcttcatacaagaactctaggaatataacatggaatccagctaatttctgaaactcatgtatttaattatacatttacactaacggccgtgtgcactgagaaaaatcctcctgattaatggcattgcttttagagtcagtgatcttttatttctcatgcaagtcatagtcaccactgtcagtcaggcttctcagttccaagcaactgaaaccaatcctggctcccttaaaaagtagatgaatctggccaggcatagtggctcacgcctgtaatcccagcattttgggaggtcaagccgggcagatcacgaggtcaagagattgagaccagcctgaccaacatggtgaaactctgtctttactaaaaatacaaaaattagttgggtgtggtagtgcgcgcttgtagtcccggctacttgggagactgaggcaggagaatcgcttgaacccgggaagcgtaggttgcagtgagccaagatcgcaccactgcactccagcctgggtgacagagtgagactccatctcaaaaaaaaaaaaaaaaaaaaaaaagaaaaaggaaaaaaagaaaagaaaagaaagtagctgaatctatgaacaggggagagggtagttcatacatacaatcacaggaacctatagaacgaggtttgccaaacaggcaggagcaagaaaaactaggcagctgccaggtccacagccaaagtcatataaaaaaaatcaatctgttgcagacactgctgtcacagctactgacattagactcatcgtttctgctcctgatcataagaccatattagttatgcatgactcactttccagtacctattccatttcttttttgccttcagatggttgtgtctaagaaatttccagaagtcctcaacctgggtgggataagagtagtagaacaagagtagtgggcagcctagaggtgtggaccaaaagcacttgccttctaattatgacatcagggcttgcttaagcagttcctcctgatgacagagcacagcagggcagggtatgcctgactgtaagaagtgtaaaaagataagatgtaccattcatggacagccttgccacatggtcacctgaattccgcgtgatatgaacataatattacaaggtttatagatttaatctctcctaatactcagacactatccaggtgcaacttatttgtataaaagacatggctttctccagctaatcatattatacgttccaagtctcttctctctccttaaattctggatgagtatttcacacctttgcctctctttaaactctcaaaacctatccccactctcagctgatgatgcttctttctaatttactgagtagacagaagcaataaggactttcacagactcccagttgataggacctgcactcaaatactctactttcctgcctatagattaattatctatgctcctatctaaggcaaattaaataataatgctgtataatggagtaaatgattttggtttattaataataaaataacactctgctaagttctatgcatgcatcatctcatttaatcctctcagcattttcacgtgggtgctttaattagccctggtttataaataaactgtaacttaggggagcgaagtaacttgtctaatgttctacaactagtatttggcagcagaccaagtttgcgtaactttgaaagcttcagaaaatttttaatcccaactttgtgatgttttcagtgtatcatagaacatagcattgttgatcatcaggtctctcattccaggttacccgataagccttcagcctgcatcccagctggcggatattcttacccagtgtgaaacccaaacctttatacttggtgaatctaacccttgagaccctgaatgcatttcacaaacagagatttttcttgctttctaccaccaggcatggagtatccaaaagtactccagcacattccttggatacctcaatattattctctgccctctttgtgcagcagcaactatttaccaagcctatgaacaaacttggatgtggaccttagtctcctcttccaagatatatcacacaaggttcagccactgggaaactttctcttccccactgtccttcatggccaactctaggtgacctcccctatttcatgtcacagaatctgcttacagttggtaccaaacctttccatcctctttctctcataacctaagtaaaggcccaatgggcctgaccctccattacttttctgacatccactttccttcttactcttttgtctttctgtacataggcatccatacttttcctcatgccatgccagcctttgctcttgctgttattctgtctgaaatgtccctcatcccaatatccacgtgaaaactccctcctcttctagcgtttgcttgaatctcacattctccaggaggcctagctttcccctcctctctcaccagaactcctgatctacactactcgttttacttttttgtaaaagtaaaagtgcttttcactttctaatatactatataatttacttaccatttaaattttattgtctttccccccaccagaatgttaactcctcgatgtcatttcttttgtgcccacaagcacctagaaaaatcctggcccatactggactctcattaaacattcaatgaactgaccctaatcttagtgacctccatcatgatatatgctccctgagatctgctatagactccatacaacccccgacatggcatcacaggacaagcacaataacaaggataaagtggaatagctgcttgtgctgcagcacaatacagcaacgagacctctcttcctctggatacccctcaaagataacagctgttcaagtcacctggccagtgagtccaaacagcacaccataatgtggtacataccgcctccaaagtctatggaggtccactctagttttgttcctcctctttctcagcagtggctcagtcaagccttcttttctttttcttttttttccccagttaggttcttcccatttattttgtctccagagactctatgattaattagccaatatttctttatgtgtcattaaactcttaaaggaagactcctttctaaggaagctgtaggaatctcctggagatgatattacagtggcataatgtgaataattgtctcaagaaagaaccaagataccttgactttcttcttctttagagtgtttttgctcccttcagagagaatacctttttaggtattttctttcagactttatggtgaaaattattagtcttaaaatccttttcaagatttaccttaagatgcctattaagtacaaagaatatctttggtgcccagacctgatatccaggtgttccatggaatatcttgatccctagatctttgctacatacctatagcatttctgtctttatagcaatgtaaactaagcactataatcacttttactgcaaaatcgtaggctacatagagtctcttgaactgccttaacacagtttctgcatttttttacttttaggatttcctctctgaaacctgaatatgtaagcaatcaccagctgtatatattaaagccattgttttttctacttgatggagaccacgtgtatggctggatgaccctgtgttaaactgcatttggaccattgctcttgaccatatatttattttcacttagaattttagattgtttgtggattttggctccagtatagatttagtgctctactttttcattcatgcagtttttcatcacattgcccctgaatgattttttggaagtggaaatatgattacctgattatctcattcataactacataaaatctttctatgttctcccatcactttcaggagaagagtttgaattaattagcatgaccaaacgcttctttataatctagtactgtttatctttccaaacttttctgccagccatacaggtgcctacagtaaaaaataatatttttgtatcaaaaagatgagacatcaggccaaacatacctgtggcaagaaacacactatgatcttgggcatgtgatgatgaaggctaagcaacatcccatttttctcaagtgaaaaactatctttgaatcttggttcttgaaatgtctactagctccaaaagtggaacaagcattttctacaggaaactgtacatctgggattagtactatttagactttaaatgaagaaaagcctctgtttaagcaaaaggaaagatcaaaagtattctcagatcttttattcattcattactttcccttctggcttttttttccctgtaactttgagagatttttgaagaggaagaaggcagtaaggtcagaataaggcacacacaagggagttggaggtgaattcttgttttctcagcacttgctcttggttaggtattgggctgagggattgcacatatattattgcatcaattctatgatacacattgcttttatattttaatatctcagaagtatgtgttgaaatcaatagtattttagatttgatgaaatatgccttgcttgatctgaacaccaactttattaacaaatttatttatttttatttttttaacattaactttattttacagattaagaatctgtagatcagagagattatttgccctgtgtcacaagtggtagaaccagaattcaagcagaggtctgaattactccaaaacccattaacaaattgtagacattactttagatttgggataaatacctaatgtttattatgacaaattcaggatccaaaataatcttgactggcaacagcagcctgagacaaactaaataaaactgaaagtgatcccctctcatatcatgaccttgttggaagaagtaaatagcaatgagagagtcaggaattagacagaagtagaacaggtactggagtgtggtaggggttaaaaagtgaagagcagtgggtaaagatgagagaaaaaagtctagactctagaaataggcagtagaaacttgctatgacaggtgagggaaagtttagtatgaggtaatggggtgttttgacaggcagacagagcccaggaggtgcaaagctcagcacaggaagtacaaaaagatgcaacagaatgcctcagaaatctctttcaacagctagcaggtcataggcaacaagccaatgggaaggttttagcattagccaatgctagcaaatattttcactgtagaagcatatagttttgaaagtcagtgaagaacatcattttttctaagatggttcataggtcaaaatcctaggcctgggagatgctagaaggtgataagagaaccagcagtaacataatgccaagatgttagatgttagatgttgatgttagaactcctagtttgtagctatgctatactagaaaaggaagaagagtgcttcagtagctcctatgactccacaagagggtaaacatacaatattacagaggagggaggagttgtaagctggccatgttactgctggtcaagtaacataatattctaccctcagctgtacaagggcttagattcctttggggatggaagagcaatatgatggcttctttctgcaggaggcttcagagacaggagattgagtcaaagctgaacatgcccccaggtaaagcaatgccccatccacatggaggccatgaaccagagagaggccagggagaactcttctggaccaatgagtgaacagttacctaagtatatctctgcctcccctattctttctggagttaggccttgaaaggagagctaaagggatgatacatccccagactctgtccccatctcacaaggggctacactggcaggatgagtaaaagagcaaaggccaaatgttgagccagtggtgaggggaagcatgacatttggtatgagattggagttttaaagtggcatggaatgtagttccaaaactgaaagtgcttgcaaagtcatgggatttgcctgggatgttattgaaatgtaacagcaaagggaaactcaaaaaccatgtgaggtttgattttatgtgtcaattgactggaccactgggtgcccagatatttggttaaacattattttgggtgtgtcggtgagggtatttctgattgaaataccctctattttattttttaaaataaataacataattatgtatataatataatataaataatttttatttattttaaaatatcctatctatttcaattgataggttaagtaaagcagtttgccctcctcaatgtgcatgggcctcatttcctgttggttctgtttctctgtagaactcctgatgaatacagtatatttgaagaaagcaattcaaaaaataaaaagtcgttcttaatttatccccaacagagttgagattttgcaataaactggttacagttttgttataaagaggtattagagtactcagttgtgaatgttcaactacacctctgaatttcctgcatcacttttgtggactcattttcagtagacctagccaaacagtctttaaatgaacatattatatgttacttttgtcaaaagcacatcatattattagacaaagcaatgcaatttggccatgagactgctctcttaagacacctctgaaagtgtctcaaagcatagtcagctattagctaggaacagaatttcacatatttacttccaaactagccagtgcatggtgtgcaagagaataatggaaaagagatgcagaaacaactcgtttcaggcacagggaaggggaggctggttggaaaagaaagcagtcttaatagcacagtcattaatttgccaaattcttttctggacttgactgtgactctctgggtagtgtgttatcaatttcagcctcattacctatgcacagcaagggaaactgaggacaaatcatgtccctagacttcagcctgttataaattcccttgcatttgagatcaaataaagcctcgaacttaaattactctcttcttacatcatcatgtctgcttcatttgctccaagtttattctcccagcataaaaaataaggaaagtcattaagtacaagaagggaaatggagtggtttgtagtggtgtcagcttcccctctccagatcctctcccaagtgtgtcattagcctcagatgaaggccatctgaggctattatacttagtcattgtgtgtttaccccagcattgtagctgtcattggctaggcaagaaaaaaaagtacatctggctgggattgtaaatgacacttgataaaggtattcacagaagtgtaggcaaggatattgagatgcgcaatgactagcaacagtgggaagtggtcactactgctaggcctgaagaagcaggaggaagaaatgattaatgtggcataaaatgcagcagccacaagagctgcagtgtcaagcaggaaggagcaagaagagaggtgcactgccatctttctccttctgcctgtctgtctctttttgatgtctcctgttggctgaactcgaccaaaagtcaaagggcaaaggaacccatggtcagtcccttaggtcacaaagatggaaaatggattggagggtggggatagggagaggcaaatggagaataattagctcagttgttttgcatatttgtatgatttgtttaattatttttattagttttgtatttagtaaaagaaaatttatttatccatcaaggcctaggttctgttgcgcaattattatttattatctactgacattcctggtactgcaactgtatctgggatctttcaaacaatatttcaatatattatgctttaagtttagggagaagagacatgcacatacaaaaagtggggctggaaaagtagcttgagacgagatcattgagaacttttactggctggtgagaattttgataggcagtaagaagacattgaaggatgttgaggaagggagtgttttacttagaaatgtgttatagaaagattaagctgacaacattatagcagatgatttgatggaggagaaattgaaggcagggaaaactggggaatcagcattagcctggtaattgattatccttccaacacctctgtaaagctgttgggtgcaaattgttagtggtttactatctagtgcatgggaactgcaggaagattcaatgcactccaaaatagtagcttctaactaccaaattaaggacaaggaggaagctaggttactcctaagtgatgtcggccgatatctcaaatgcagtgacagagagggcctcatgtcatgaagtccaaggacagtgtcattagggcaggaatttactggcctccatgagtgggaaatgaaagtggtcccaggtgttcactgtgaaacaaaccccaaagttacacaatctctttctaaactgtttggaaagtacaaagaagggaggtagggagatgactccagccatgctttgggctcagtgattactgctgtttctgctgacagctcgtctctcatggagatgagccatatccttaatgatctcatttcattctgttttccaaaaagttatactcctcctagataatcaatccttttcaatatcagtgctcaccagccacccccagcccagaagatgttaatctttccatgacccctctgggacctctttcccacccttcagaaatgctatgatcttggaagaaatctgctgttagatccttgtacatatgctattctaccactagactacagttcctgagagcagagatgatatttattcattttagcactcttaacacttattacaaggcctagcattcgatagagttaaatacattttggttggatggttgcatccagctacagatggatagctgtagctatctttaaaaaagctgttttattgggttttaattgtgggatttaattatgttttgtttatagaaaaaaatcatgttctcatcgcatttactaatctgcattatttctgccaacagtatttgatagcatcagtgttcctgtcttctcagtttgaataaataaagtcaagttaccactcacttagggtatataaatatgtaggggtcccattctcacatggttctactataatggagagcttagccatgtatggcttctcaaatacaggctcaataaagataagtaactcaaaatttttctaatatgatttctcctggaacatggtgcagtggcgagggcaacatgatggcaggggttagtggcagtataggtagacatgtaatgcatgataatgtgaaggtggcatgtttctcattcagctctgttggctgctactaagaattcattgcttttactttgtgccatagaagtttcacagaggttgaaacttattagtaaatcatcacagagagcaactttatagttgatacaaatcaccttgcacattacagcattttcttacattgtggtttcagttgtgaagatgtgctatctgtttccattctgcctgtggtgttagagaacaagtcatgggaaaagttgaaatccaaagaaatgtgcaaagcacaacattatcccttcctgttgttcctggtctctacctttggattctgcaccatgtttttatgctgaaaggtgttttaatgatggctgggttgggcaatgacatgtgaagaggtgtcacttcacctggccaacacagagttcaaattatccaaataaaactactaattgggatcttcagatcaaacactgtcaagaagactattattgaggaaggattctgcatgacctttcagagaaacaagatcaaagagtagggatgaaaatgagccacattgttaacaataaaattagagagcaggaactcagcaggacttgtagttaccacatctgtaagggagttagaaatgaagcagcagagacaacatactgtgtacaattctggaaacatttatcatttctccagtttattatttttatgatttcttgacagtttttctatagtgattagtatgacaatgtataaaactagaagggcctgccaatttaccctccaaggcaacaaggaattaagggcaagaggaaaatttccaagagctggaaaaagctacttaattacaggacaaactaagtaaaaggaaagaagagggaagtatctggaggcttggaggtgatctggggctgagcagccaaaaagttcacaagattggatgtttcacttgctattgggaagaagagaggagtagctgataagaagaatgctctttgatcccctctacttcaaagcattatggatctagattaatattcagtacttctttactcaggtacttttctttaagcttcacctcccttccattagagcgagaaaacattttgtagtttctaaattgtctcttcataagttccaagggataaagtgggagacattcaggagcctggtacattagcatcctcttaatgcagtatgaagttgaggggcttttaatgtggatatcaaaactgattattgaaattgcaaagaagccttgtatgctgcttgcaagctgagatggatgatgacagtggagccttttgcattataaattagaatggctcctccctttttaagtcattgctcttttaggttgctaatttatctttttatctgtgatttatccttccttgctcacattcttaaacgtttttccctctgctgctatgttttaatagcatagacttggatttactgtgactgatttggcaaatttcaagctttagaaaggtgccttaaaactgttgctgagagctttctggagatgggtaataacattgattggaattgatagtctcttgaacaagagaagttgaaaatgttgccagggctccaaggaatgacataaagttgatatcttcatttatttgtccaatcaagacttggctatttctgtctaaagtagtaaacagacatattatttttactgctattaaaagtagcagtagcaataacaatatttatataacatatattaatatttcagttaggattttttatttcataccacataaattatctttgataaacttaaacaaaggagaatttattgaaaagattttgggagcacctacaatcattgcaaacctggagagccagccctagaaataggcaagaaccaaggcagccctagagagaaaaagcaggacccttcagagaggcttcctaaccaaaaccattggaaagtggccaccctcctaggataaagagaaattccagccatttctagcctctttgccctttagttgggatttaaattccacagatagggcatcttgtttgacctacctcggatcacatgcaagccccttgtttaggttgtgtagaccccctgattatttattatgtcagcagactttatgtaataggaaagacaattgctcaagggcatagagagatattgttaaaaatgggaattgaatgcccagcaaccaaaaaaataaatccatggtactttactttttataaaaaatgtaaaacatattcaacttaacctttgcagcaacactctgaaatatacaggcagtattaaaactgtgttatagattaggtaatttaggattaaacatatcaggtaaattctcccaaatcacatagtaattcagtgacagaataatattcaaaaccaagtgtcctcattatatattttatgtttttctttgctttctttcctattctttggggctttgatacacaaacagataagatcattgaggaacttcagttccaaaatattttctccttttatccctctggccctcccaccctctgtcatcactccttgtatctttctttgttccctttggctaatattattgaaagcttattgaatcctcttcccttaattaatttgaaaagatgaacttcaggtactgagtgtattgactttttttttttatctccatgtctgtattaattaggatgagttttggctgaatatgctggaaatcctaaaataacagttgtttaaacagaaaaaggtctattatcccacataaaagccaaggaaagccaggtctggtgtggctgggtcatcagtaacccagcctcctctgtctttttgttctaccatattagctctggcttccaatttccaagtctttttagaagttatcatgacggctggagggccagccatctggccagatgttacagattggagtaaggagtaaaagcagaaaggcaaatgagggttttctctcgctgtacgtggtcttcctaaaacatcttagagtttcttcccaacaacttctgcttatatttcattggccaggacttaatcacatggctacactagttcaagggtaaatgtaatatctctttctgaactaaggttgcttgcctttaatgacaatatttaattcttggtattgttgtgaggattaaatgaggtaatgtgtgtgcattttctaacaaaagggtttggtaaataataagcacctagtaaaagttgattcctttctactatcttcctgaggcctagcgttcagagcacccatgcagcctccagttgttcatttcccattgctttttgtagaatcttatggtctaaaggagaagataaaagttttaaactcagttaggacttcatccaaatgttaacaattatgctgactagctgtatcatcttgagcaaattattcaacctctctgatcattcgtttcctcattgttcaatgtgaataatattataaaacctatcttgtgaattgttgtaagaatgatatgatatatgtaaaaatatgctcccagtttagttcctgacataagaatagacgctcaagaaatgtgagttgttcctctagccctctctccatcacaaagatttgcagtcacttattagtaaaagcctttctccttgggaaaagaaaaattggcatcttaatggcttttcattattttttataaagaagaataaagtaaatgaataataaaagataatttaaatagttttgtttttctgcttgtgaactcagaatacttcaaatatgatagttcctcattattattttttaacgaaacgttaactctagtgtatatccattgagtgttcacacaatgtgtgccaggtgtgttccagatcatagaaattcagcaataagcaaaaaccgacaaggtttctttctttcctgaaacacattttagaggcacaaataaatgaatacataaataatatagtttcaggtagtgatgcatgtggtgaagaaaaatgcacaggaaaacgagatagagaaggatggctagtgtcatgtcagataagattctcagacagaacaccctcaaggaggtgatgtctgaactccctgcccaccacaacaaacagcctacaggaccttaaggaaaaggctgtatttaggttgattactcagtttccctgagaggccatcagaactagctccaacttgcttcatattcaattttccctcagttatcctcagtagtccaagcctcccataatcattttagtattttgctccataaggcttgacacatttcctaagataaatgaatcttccctaacctttccacagtgctgctgaaattctgaatctggaaatcatggagatttcctccatccctagactcctagctgattgttccctttccttgctccaactgacacctggctctcccttggcctctgagctacacttgcagtgttcttttttcattcccccccagccccacattcaatgcactgcagtgcatagagaaagaggagggccctccacttagagatcattttattccctacctttctcaaaaaccttgcttttttgaagtgcatgccatcagactatacacctgctacccttctttgatgtagtcagccacagatttctggatcacaccctcgaattcactgaatattgcagcatctgactcactctttgtctccgtgacaaatggtggcatcatttgtgataacttctacgtgcatgtagatgatgcattcaataccctggtcttatagttatttgctatcattttgaataaccttttcttccacatcaactaagccatctcctctcccatgtttaccttacaccttttagcttaccagtaactcaactgtctccaaaatcttgatgtcaagcatttccacttgatgcctgactcttacttcccatctttccagcgcatctctttccactgcttagatttctactccattacgacttccagctcatagactctgccacttctcgctgctccccattcccctcaacccctctcacacacattctccacttctttctttgccaagcttaaatgtaagtatttgtcattaaaattactccttcctaaacacacttaggtgcccaccaaaattctgggcaaaatttcggagctggtcagatcaattcttgcctacccagaattggctcaagtgcagcaaaaaatggctggagaaaaatagtcaagcagccgggcacagtggctcacacgtgtaatcccagaactttgggaggccgaggcaggtggatcatctgaggtcaggagttcaagaccagcctgggcaacatagtgaaaccccgtctctactaaaactaaaaaacttacgtgggcactgtggcgtgtgcctgtaatcccagctactcaggaggctgaggcaggagaattacttgagcttgggaggcagaggttgcagtgagccgagattgtgccattgcactccatcctggcagcagatcaagactctgcctcaaaaataataataataataatagtcaagcaaacaactcgagctcattctaaactaatgaccacaaatctcagatgagctgtcaatgttactctgcaattttattgcaaattctggtcaagtcactctcttagtctccagaacaactattttatgtcatctcatctctacttaaacctccaaaactatgcccgtctgtcgcattcttactgagaaaatagaagaaatcacaagagagctaatttatctgtcaccgaatctaccaatgtgttctgccttttctttggacacaattcatgaaccatatccagcatttccactgtactctggacaccacttcaccttggctcctcgaggactttgcacctgcatctgtctcctccctcaccttgatcatcaatttctctctctctctcaaacataaaaacatgacattaaagaagcctacatgggctctgcaacctcctccagttactgtgtcatgtctggcctctgcttcacagtcaagctcttttaaaagttgtttttattttctcaccccccgttctcacctcaactcacttcagccaggcttgggtctgctacgcccaaatggaaactacattctcaatattctcacttttgccaaaactcatggcacaatatcaatcctcattttactcttctcagtcgataatatttctaagaattcctgcgtttttgaagtgaactcagatatttttccacatattttataatgggagtctttgagagatatgagctccttgaccttcattaagtagatttgaatggaattcaatgaaggtctgtttctccctaggcacaggtataccagctcccatggcatttctcctgatgggctctagagcaagacgtcttatgcacagttccagccagaattcaactagatttgggctctagaaattctaaactgaatacctgggcccagtaaccagggcagggatatttgatgtttaatccagctgtgaaatctttttaaaatcaccctgtgtttaactttgtaaattatactgttctttgagtctcctgttttattttgttttcctggttattggcatttccaatttcttatttttgtttatttgcttaatggattagtaactcatcaataaattcccccttgggagaagtaacacattcattgtatgtgtcatgtttgtcttaaagaaagcctagctcattggattatttcttctgttggtgcaaacactacagacctagggcaaacacttgcttatgtgcatactgaaattcattgtcattctgcttctgtatcttcaggtcctaagccttgtggaattggtgtgagggtcaggaagtgaagttgtgcagtgcaggaattagaaattccaacagaccttttgatttgtctagcaaaatgcttttaatttttttaacttaattttttaaagctgagcatgcattcagttcaccaagaccccaacaatcactttttattatctttctatctcttgtctgaccagttttatttaaaatatctttgttgagggtcttctacaggtcaggcactgtactaggctctagagatattgcaggaacaagatagcaaggtcccaaatctcatgaagcctgcatttaatggagagatactgattaaaaatgaagcaacaaataaacaaacaagaacattccaaataatgagaaatgcaattaagttaatagaataagatgatgtggtgtgaaaagtgtgcagaaggaggtgtaactatagattgactagaccagaaaaccctcctgaggagctggcatttgctctgaggaatcaataatatgaaggagccactttgtgaagaatcagggagaggatgctaagcagagccaacagcaaggtcaaagagcctgtggcaaggaaagtttggtttgttgcaagaaaagaacagtcagtgcaaaatagaagcaagaaggaaaattgtataaaatgagatcggaaagcagagagcagattgtggaaattcttataggctatcgtaaggattttggattttattttaaatgtgatggacagctatggaagattttaaagcatgatctagtttatagtttttaaagtttactctgattactgtgggtaaaatagtttatagaatcaaagaatggaaacaagaagatcaatgactgttgaaaaaaatcctcataacagataatgatagcttgagtgaggtttggaactattaaagtgaacagaattacaaggataggacagacattggaaatagagccaacaggacttgctgatgtattaaatgcatctcgtgaaggaaagagaggaatcaaggacaattccagattttgggcttgagcaacaggctagacaagagtgtcattgattgagaagggaaggactgaatgagcaacagacttagttgggaaaagaaataattctgtttcggccatgtggcgtctaagatgcatacgagacatccatgtgtaaagttgtgtaggcactggatatatgagtcactgcatccatttacattacccctaagggcttctaagtttgtgtctttggtacagaccataggttaagaacactggttcaggagtaaaaagatctttgcttgaatccagtttttgatgcttaacagctctgtgaccttgagcaaaattcttaagttatctagacctcaggatccctatctatataatcaggttaaaatattatgtacctcataaattgattgtgaagattaaataatgatatatgcaaagtgctaaacaaagtgtccagaaaaatataaatatacaatatatattagggattatttattgaacatctactctgagatatgccttttgtatatattacttcacctagccctcccacattcctaacatcagctctcccagctaaatatcactctacaggagactgagaacagattgatacaaacacagatttattttttcacttttcaaagaaaatgtacatacctgcatggactacccctgacttaccaacataggtagcatttctaagaagctgaaatggttagctctacactgaaatccacatttttatggatatgcctatttcatatctcttctttgatgtctgtcatttcaaacttgacatgatctgatctctaccccaaacccaaatcttctgctgacttcctcatcttagttgaggacatctcgggccttttgattgcccaggtataacaccctgtaatcatcatcagtccttgtctttctcacacatgctttatgaaagctttgtatgaaatggcttcatggtaccccactctcatttcctgctactcaccccctcactcactttgctccagccacactggcctacttgctgttattcaaatacactaggcatgctcttgcttttgcacttgctgtttccttagcctgacacccaaatatcctagacattcccccagacatctgtcttgttaacctgaccacctgttcaaaattaaatctctcctggcactatttcccttcccttcctttaccccggctcattcggagagacactatactctctgaagccagtttctctggagtcaattcttctatcagtaaagatccattggtcctctgcctgctgactcagccccatgacatgcattagggttgtctctagctgcaatataagaaatcatgcaactttgggaggccaaggcgggcggatcacgaggtcaggagatcaagaccatcctggctaacacagtgaaaccccatctctactaaaaatacaaaaaattagccagacatggtggtgggcgcctgtagtcccagctattcaggaggctgaggcaggagaatggcatgaacccgggaggcggagcttgcagtgagctgagctgagatcgcgccactgcactccagcctgggcgacagagcaagactccgttaaaaaaaaaaaaaaaaacatgctatagtgactaaacagggctttatttgtctcatgcaacaagaagttcaagggtagatagtctaaggcctgacacgactcagtgtgtcaccaaagattcggaatcctcttatcttctttttctaccatccttgtgcttatcctcaaagccatactattgctactgattttttatgagttccctatttcaggcagaaaaaacgaggaaagggtaaaaagcaaaagataaagagttctcctatgttgtaaagtctgtcttctatagtctgcactgcctgaaattgcttatttttcagctatttttaacctataaaatggcaatttcataaggtctgacctaatattggggaaggaacatcttccccagaggcttttttttgagatggagtcttgctctgtcgcccaggctggagtgcagtggctcgatattggctcactgctagctctgcctcctgggttcacgccattctcctgcctcaggctcctgagtagctaggattacaggcgcccaccaccatgcccggctaattttttttgtatttttagcagagatggggtttcaccgtgttagccaggatggtcttgatctcctgacctcgtgatccgcccgcctcggcctcccaaagtgctgggattacaggcgtgagccaccatgcccggccccccagaggcttctacctgcatctcattggccagaactatgccacttggacactctcagcctcaggcagagcaggacataaagattgtgtgagcctttaaggcagccacttcagtgtttgccatccacaattttgttcgttttgagttaccaatcttccatgaacttattcagcttcctggctttgagccatccccctcagagcctctgttacaaggcagccaccactgtttcatagacatgggggttcataactcttcactaaatccctactccacacctcagcacatgagaacttttgggtctcttatgtgatatctacagattttgaggaattacatttcagagactggggcagtaatgatagaatctcgggccttctgtctaaataaaccatactgtcatttccattctaccacattatcctgtgctcgtgtggctaaaaaaaaaaccctgcagagctgaacttctaaatctttatacatattatttaatctaatcctcacagcaagcttttagctctctcttctattgctattttatacacgaggaaactaaatctcagagaggttaaatccaaggccctttagctagcaaatgacagagcttctattcaaactcaggtctgcctcaagccaaagcctcgtcctgatccatttcattaaattactaccaagtattacagatctttcctagggcaatcattttcttctatataggactcctggagtcactctgagtatttctaatgaggctgacaacaaagggaagcttggaagtttctaagcagtcacttccacagagttgcttaatttgccctaattcctggtttttgcagcccctgtcctaggctcttgctcacatatggacttgaatttgtggaaaggtcaaaaatgatattctagatggagagatagtcttggagtacaaagaacataagcagaaatgagtaaataaagctctaggagagcgtgtgatccagctcaattaaaggttagataagccatggtggcacataagctttgaaggtagagttcaaatcataccattaggattttgactgccaggcagaagagtttgatctttcttctgttggcaatgatgatgtattggaggttttgacacaggagagttaaattatactttgtgtttacaactttaaaaaatcaaaaaatttaaaaattgccttgaatgcaaagcaaacataataatcctaccatagggattccaaggcaaatttgaaagttttgtgacattttctgttatcatttctgttttccaagatagcaatgagatttaatttgcgcatcacaaagaccgttagcctttaaacagacaaaacagaaaattcttacgtctaaattcaatttttgttgtaagaacaaaagttgctcctactaacgttaaataacaaatgaccggaagcatcttgcaattcaatgttaaaatagttcctgaccaggtgcagtgtggctcacgcctgtaatcccagcactttgggaaaccaaggagggcagatcacgaggtcaggagtttgagaccagcctggccaacatggtgaaaccctgcttccactcaaaatacaaaaattagcggggcacagtggcatgtgctactcaggaggctgagggccagagaattgcttgaacccaggaggcggaggttgcagtgagccgagattgcaccactgcactccagcctgggtgacagagcgagaatctgtctaaaaaaaaaaaaaaaaaaaattcctaaattgtaaaaccagcatggcaaacgaaatgaatattatggcttccttgtctagagtagaatggtcatgattcagaatataattttttaaaacatattgaagaatattgaataatttaagtgactcattaataacattgagaagctacatgcaataaactcagctagaccatttaaggtactggtttttatttgtccaagtaatgtcacattattgaggtggcacagaaaacagtaatccatctgtgagtcagaaatatgtgagtcagcaacactgtgtgaagagccctctgtccttttgattactcaaactgatgttttgattcaactgagtaatttaccagtaagttaagataattgagtattaaaaaggaaatccatgttgagagaattggttgtgaaaagatgaagtgaggaaatggagttattgacagagctgagaagtattcagggatgtctgtatcaaataaatcaacccttcaaatgacttgttttactgttggtgattgagtgagtccaaggacaggcttctaagagaagcagttaaaagaaatgctttgcaaatgtgtttcctcaaatacttaaatttgaaggcagtaactattcaaaggatggatttgcaaaatagcaatgccttctttaaaaacaggtgtttaaattggtattgatatctgaagaggaaaatgaactcacattggttaaaaagtaaagacttctctattcacttcaaaacactggtcttatttccctcttttgaaaggcttcctatggaaagaaaaatcaaagcctatcacggtgattcaggagttttatactccatgtgtgggtcaagtgtgagtgaggtaaaggattgtgacagttcctcaaggatactgtcatagtgaggccatctcccaaacctgactggttccaccttaatttggctttggggaatgaaattggggactgtccagcccgatgaagggcaagctaagacctgctcataggcatttggtttaaattacaagaagattaaatttctaaaaataatggcaaagaacagcaaagcctggagactgagctttaatagaatcatcataccatttatttttggaatgttgacgtttctgaaactcctcagatgcaagatcaatgctaagtagttttatagaaattggatgcattttccataagattaccagcagagcagagggcagtgatatgcaaaagcagtgcagagacagtgcctcaaatacactgcaaagctctgtccgggcgcctctcctgaagcacctggcatcagcactacattttcagacctttatctgttaaaatgtttttttgcccttttggggatatacagtgtgctagccttgttgtctagctgcattggtcattcatcatagtttttctgtagttctcattgttttaaacacattagggaaggattggtaaatagatagtattctatatcatgataaaagcttgataaaatcacctaggaaatcggtgtagaaaaagaaaagagcgtaaagctgagcccaggggccctccaacatttagaattggaaaaaaagttagagtttggaaaaagacctaggaagccaagaatataggagaaaaaccaggacaagacataccttgaaagtcaaatgaaggataacttgggtcaaatattcctgatatttgagaaagatagtgactaagaattgaccattggtttggacaagacgtaggccactgatgatcttgaccagagggatttattatgaagtgttgcgggccaaatcctgattctagtgtgttgagaagaaaataagtgttaaggaaatggagacagcaataaagacaacttgttagaaagttttgtttaaaaagaattgccggaaaatgaggcaatggatgcaggggtgcatggaataaccacaagtctttttaaaacacgtatttataaggtacaaatgacatgccaaaaatgcacttcttaaagtgtacaattcagacacatatacatttatgaagctatcattacattgaagataataaatatagccatcaaacccaaaagtttccctttgcaacccctcccacctctccctgacaccacccctttccccccaggaaactacctatcttctttctgtcaccatagattgattttattttctagaattctatataaatggaattatacattatgtactctatttatcagacttatttcactcagcataattagtttaggattcatccatgttacggcagttgtcagtagtgcattcttatttattgctaagtggtattccactgtatgggtatatcacaatttgtttatccattcacctgttacatttggattgtttccagttttttttttactatgccaatgctacaatgaatattctgcatagactattatatcatctattaataaaaatcattttatgtcttccttttcagtgtatttgctttgatatcattgtctttccttattgcactgggtaaaacctccagtaaaatgttgagtagaagcggaaagaacaggcattcgtacctggttcctaattttatagagaaataattcagtcttttatcttaaaggataatgtcagctgaaagttttcacagatgccgtttacctggttgatatgtaaatatatgtgtgtgtgtgtgtgtgtataaaggatggatgttgaactttatcaaatgcttttttcttcacctaattatgtgattacatgtatgttggtttgtttttcagtctgttagcatggagaactacattgatttttttttgtctgttataacaaccttgtattccttggatacaccctacttaatcataaggtgtcatcctcttcatatgttattagatttgatttgatataattttgttaagaattgttccatgtgtgtttatggtgatattattcttttgggtgattgtctttgatttttatatgggagaaaccctgaccttatacagtgagttgagaaatattccctcctcttcaattttctaaaatgatgtgtagagtcagtataattttttaaatatttcgggcagaagtcaccagtgaagttatctgggcatgcagttttctttatggaaatgttttaaactttaaaattcaatttctgtaatagatacagacctattcacattatttctttcttcttgagtgaattttgatagatggtgttttacaaggaattcgtccacttcattgaagttgtcaaatgtactggcataattattattattatttttgagacggagtcttgctctgtcgccaagactggagtgcaatggcaggatgttggctcactgcaacctctgcctcccgggttcaagtgattctcccgcttcagcctcccatgtagctgggactacaggtgcatgccactatatctagctaatttttgtgtttttagtagagacagggtttcactatgttagccaggctggtctcaaacgcctgacctcaggtgatccgcctggctcagccttccaaagtgctgggattacaggcatgagccaccgtgcccagcctggtataattttttttatgattctttattatttttatagtatctttagagtctatcctgttatctcctctctcattctttcagtaacttgtatctcttctttttttttcctggtaagtctgactagaggtttgtcaattttattgattactcaaaacctgttttggcttcactgatctctctctccctctctcttttatttccgctctatctttattttttcccttctgcttcctttgtgatttatttgctttttcttgagctagaaacggaagtcattttttctatttttttaataaaggtattttagagctgtagatttccctgaacatgctgctttagctgcatcctacaaattttaacatataatgttttcgttgtcattcagttcaaaatacttttctcttttcattgtatctttagctcatgagttgtttagactgtatttagtttacaaatgcctggggctttaccaaaaatctttctggttttgatttctagtttaattccgctctgatcagaagacaaactttgtatgacttcaaatttttttgatgttttgagacttgttttatagactagaacgtcagctattttggtgacgtttcacgtgcacttgaaaaaatgtctatctttgtcaattagttaaattgatgatgttgttcaagtcttctatatccttactgggtttctgtctatttgttccatcaattattgaggctataattgtgtagttttctatttcttttttcagttttatcaatttttgccttatgtagtttgaaactctattaataggtacagaaatatttagaattgttatattctcaagaactgactcttttatcattatgaaatcatcctttttattcctggtaatattcttaactctggaatctacttattcttttattaatatagacattctagatttctgatgattagtgttatcatagtttatcttttttcattcttttccttttaacctatttgtgtctttatatttaaagtgatctattataagccacatgtagtcaggtcatgcttttttaatccatcttgaaaatgtcttccttttaaatgtgatgtttagaccatttacatttgaaggtaatattgccatggtcaggcttaaatctaccatgttgctatttgttttctatttgtcttatccattctgttgaaaaaaaatgtttagacaagttaaatttaacagagtttaactgagcaaaggattttttcagaatcgggcagccctcagatcagaacaggttcagagagcagcattccacagtatgggcagcagcatttattaatagaaaacagtaatgtacagaaacagcttgattagcatgattacttggccatccaaaattgaagcttggctgctgtgattggctgagctcagctatttgttacataagtataagcctaagttaagctttcagttaatttatatcgtaaaaagtacagaggaagtttcaggctaaatttagcggttcattatatgctttttcctctttttcttctcttttttggatagttgttttatgcttccatttcctttgttagcttattatatatatctcttcatttttaaaattttaatagttactttaggatttagagtataaatttttagtttatcacagtctaccttcaagcaatattttaccgctttatctagctgtaagaatcttcagaatacccttctatttcccccttctttgcctttgtactcttgtcatatagtttacttctacatatgtcatgaacttcacagtagattgttattatgtgtgcttttcaatcacttatcttttaaagagattttaataagaagaaaaaaaatgtttattcctttgtatagaaccagatttccatctggtatcattttccttctgcttgaaggatttcctttaacatttcttgtactttgggtttgctggagatgatgaattccttcaactttcatatgtttgatgaaaatctttttactagttattttttgtttgtgggtttgtttgtttttgatacaaaactttacagcttgattgtttgctcatgcaaaatacaaaacgatgatgcaggagagagtaaatgtatgcagaagggtagaccatgagtaggtgagggaggacagggttcaggacagaggagttggcttctgataaaatcacagaaatgtatccatagcagcaagaagaaagacagaacagttgtttacacgtgtgagttgattgattcattaatggatccaaccaaactggttttaaatccacgatgtaccatttaatagctaagtggttgtcagcaagttatttaagccttttaaatttgaattttcacgtctataaaaacaagttccttccttcctcagaaggtgattagagcaatgaaatgaggtaatatataccaaatgtacagcacatgacctggcacattgtgcccactcaatacctgtgagaaaaaaatatatagcttttctatgctttactgcctaagtacaagtggaaagattctgaaatatcatttttccacttctactttctctgcttccctttctctcacccctcctcccttcccaaaagaacatatttaaaatccaaatgccaggctgtctgcaggtgcagtgttcaagactgataacatttggaggccagatgttaactgacataaacactattaagtgctatgtagaccggaggctgaggcattgatttccaattttatgattattatttgaatttacagcaaaccataatgccattccttccacgtctctacctccaccaaaaagacaatatatggcctattcattttcaagagaatataaattgtttttaaaaatatgaagttcttgaaatattaagttatgctgtttcacaaacctggaactgaaaatgcacccttgatgtgcacctcaacacctccctagagctctgcttgaaaggtcaaagacttgtgaaatttgatctgaaaaccagtctcattttctgaaataaatgcagagtaataacgacaaaaatgcttcaaacctgggacaagtttttacatcaacttatgttttaaatctcagtttccttagacttgatgtgggagctggcccaatgacaataaataaatatcctttctctgagtaaagaaatactttgtaaaaacaagttgggtctgctgtgaaccatggaggttattgttggtgtttaatgcgctcacacagtcaattattctttcattaatctattgagcagacatttgttcataacctgcagtatgtcccaggaaagtgccaggcactagttagtataccgttaagtgcaacagatggccctcgtggggcttagagttgtgtgagagaggaaggcaataaaaggggaaaaaaaagacaaataaatatagcaaaaagctttaataggtactgtgaagggaacttacttaaataatgggttaaggaaggaattttttagtagatgacttaaactaaagcttaaagaatgagaagaaggcagccatccagagagtagaggagaaaacaaacagaaagaccaacatttattcattcattcactcgacaaatatttatgtagcactttctaccagccagggactgttcaaagcaaagcagatataccaggaaggaaaacacacacgtgcaaaattgctgaattgagaaaggatttggcatgttctggaacagaaaggaagcttctgaggctgaatcacactgagcagggcacagtgtggtattggatgaggatggggggtgtggcaagggctagattatgtgaaaatttgtgatccatggcaaggagtttggattttatcctacaggcagtgacatgattttattattgtgttaaaagattgctcttgctatgtggagaaggtttggagggtggagttgggcacagtggaagtggagagatccatggggtggctattccagttcagatgagagattttaatgccgtggtggaaacagagatacacaaaacagtacagtttctgtatagagtggataggacctgttggtcaactgaaaaggagaaaggaggttgggaagggaagtaaaatcatggatgattctggtttgtacaactgagtagatggtggttccatttactactatgagggagaatgagtgagtaggtggttgggagcagggaatgaaaactaagggggcggggaagggtgggataaagattaaactaaagtttcctagccaagtcttgaagaattaaatcaattcaaaaatttaattcattatgtcagtggttactatggccccatcactggaatatacaaacagaagctaaatgaccatttatctgcaatattttagatacaggtttcaaacatatatctagaactgattttcaaatggtaggtgagaacttacaaaagaaagcagcaatttcttgaagccatcactactttagtaaaaactagttttcccagatcaatctcatttccctaattgatcttgagctattggaagctggcaccatatttcttaataaaaatcttatttaattaatagattgtcttattggcagagatacttaacttatgaattaaagtatttatattttactaatagagcatttaacgatctcttatgataactttaaaaaatggagaatgtagcctggaaaatattgagcgagtagaatattttgtatactcaaagtgcaccctggggcagaatcaatgcaaagccacccccctccctggccctttataatgtctacatacagaaaacattcccacacaaaattaatctcttttagagaacttttcctttccttagaattacagttttataaaaagtggtaattactattaaatgttgtaacatcgtttaggggttttagtagataaaagtttgaaatcgagtctgtgaaatttcagccataattagaaaacataaagaaagacatactttgtaattcctattatttctgagaaacattttttacctggaaagggatagacagagcattttgtaagcttgctagaaataatgctcctatatttatgaagagggaatgtttacatatggtcttgttctgcttgtgcattaaatagtatgacataggaacaacacaatgggaaattaccaaagaatcacactaaaatatactcctaagcatttgaaacaaaacttttaaaaaatgatacttaacaatttcagtagagaaactaagtgttgatattcttttttcattgttcacccatttcttgatagtgaaatgtttacaacccaaaaaaaggatctcaatcaataagtaaaataatttgcaaaatatatttatcatcaaaaattaaagctttctaacaaaggaacattgagaagtacttgtggcatttccatctctcaccacatcaataccaaagaatgtgaatgatttttgctgtgtgtggtcattgggcctctcctttgggcttagagccctgtggaaggcattctagcccctccctgcaggtggtatttggtagcacatccccagttcttctttatggagctaacttttaggggttgattagggtacagggcaagagatgactgagtatcaccgtatcacccacagtcagtcttgttgaagttcgtctgtgctgtctgtggtgggtatcaaggggagtttataaaaattccttggtcccaaaccattcatttgttcatttgtttattcatcagacgtgataggcatggcccttagcactggggttaaaaataagaaaaagattcaaacctaagtatcatctgactcaattctttaaagtatagaaatgaggataggaaggaactaaaggacaagttttaccactacctgtatctgatcttaactcaaatgacaccgcctgagaaaggtggatggtgtttcccggtgaagtgcaatagacaacctacatggctggatagagcggacctgctgactacccaaactaaagaaacattattccctttgtctctatcacactactatgttttattttcttcatggtatttctcactatctgaaactatcttactttcctatttgttgtctatctttccctcagggaccttgttccatacactgctgtattctcaggcggagaacagtgccttgtttcatagtgggtgcttgctaaatatttgttgagtaaatgaatgctcatcaccattaacataaaaccacacttgataaccaacattttttctatctccaaaatgtctgcaagttgtctaatcttgtacctcagggatctacctcacaacttcatttctgtgggaaaagactgaggtgtggggggcaggatacagggagcccctgtttcatttcagttagttcccccacagagctggaagtagaagccggatccctagaatctcagagctcttcagcattcctgtgctacctctggttgagcctttctgtggagaaagcagttttggattactgccatgaatgtaattttcaaaggccctggaagaagagaaagcaatggaagctgcttctagacttcagatgagctgaacatcagagttcgtcttcctagtctgtggaagggaagtcatagactttggaactgaattcttatggcataactgtaatattctgctgtagctgtggccagaggagttctgcctgccttcgtctaggtcgtgggctctatattaggctggctgtgtttttcacagcttagtccttcattagaaattaggactggctgcagcctgcagtgactaattatagaaagatgggtcattgtcattgtgggtaaaaacacatgtgcctgttaaacttctctgtctatagggatcagatagtacatttgaagtgatagccaatataatcacttaagtaaatggataaatatttatttgtttttattaaaatgatagacaagcatttgaagacattcatttctttttctttttttttctttttgtgagactgagtctcactctgttgctcagctgggagtgcagtggcgcatcttgtctcactgcaatctccgccttccagatgcaagtgattctcctgcctcagcctcccgatacagttagtttctgagtacaaccgaggagaatattttccaatagaaattttaagaaacacagcattttttcatgactatgcctacccccacaacacacacactctatacagaaacatacaccttattatagaaacattttctgtaagcaaaaactcctaggacggagttcctgggatactgaagggagaatgcggaaagaagaacctagtgactccctttaagagctccactgaggtcatcacctgccagaggttttaatccaaatgaaactggctttttgtcagatgcgagaaaaaactataagatctttgcattcatttaacaaatatttgttatgtgccttttggtgtgatactcagctctaggccctgggactacaaaactaaatgaaggcttcattcctgcttcaaggaggtcaccatctggtggagtgagagagataagtaaacacaagagtatagtctagcatggccggttctggaatcaaggagtctaaggggacatctgaggggtcagggcacagattgtaaggtgtaatgaaaagaggtcacaccttagcagttttcaaatgaagcttcacatttttcaaatgaagcttcacattttggatcctccattttctcttctttgaaatgaggcaaaaagaattagcctgccagagttgttataattcaatgatataaaagagactcagtgagtaatttctaagaaagaaaagcaaaattgagacagcaagagctctctcccaaaaggcagtgaaccattctgcggacctgtggatttgaatctcttttgtggagtttgcagtctttctagcgggttatttgttagaataagccaaagaggttcacctagagaatgactaagttgcgaaagaaaaatctcctctggttcagaaatgaattattcctaggatgttgcttcatgagtctttgttacagaaattggagtttgtgcaagtaattggggatcaggaaacaaccaccctggggacaattgcaggcaattctgcgaccacctggcttaacttgaattctaggaagtagagcttctcttaggttaatcaaaggtttcatggtacaccttgtggctcttttctttatccctgatttttcctcccaggcttatgaataaggcttcagttatgtttctccctccaaaattgccagcagccccacctgctgggcttggaggctggggcctgcagcctaaggacagtgtggcagtctgctgccatctgctggctcacgtgtcaccagctcagggctggctttgcaaggattccccaggaatagaaaccaccaggagaataactgtgggccagagaacgttcctgctcatattgaaaaatgaagagatgagaagatggcagacacaagctggtataagaaggcttttctcctcctgcgagtttgtgtaaagatgtgaccatctcaaacagctaagccagtgatatttctatgcagatttgttttgctcagggagaacatagcagtgctttctaaaaaatgtatcttattttatttagatcactgtctcacaaggccgaacaaataaattaatgacacatctctgtagattcatttaaaggaaacagcagaaacacaaggcagtggggtctgaggtgggtatagggaagcagaaagaggggagggattggagaaacatttcgcagtaagttatagtatattttagttggttctgtccacattttttgaagacctactgtttacaaggctctgacccaggtgcctgggatacaagaatgagtaatacttagtaatactgagtcccttctggcttggagataacaatgtattggggagcagtaaataaatagagaattaaaacagaattgcaagtactgtgataaagtactatggtaaaggaatctaggagagcacagaggaggagcatgtgtcaaaatcaaactggactgcagtgtcagagagcgcatactctgggagatggcatgaactgaattttgaagatactagctcaatggagactgtaatgggaaagacattccagttatgggaagcaccacttctcatacagcccatcacccaccatcactgcctggaagagctgagaacactagatacaatgcaagagaaggctgttaaaacattaggtctcagatgagcaattgattcagtccagggatattggcagaggcagggagaagaaggcagatccaagtgagcaggcaacataaataatcttgaagatcagagagcagggcttggcagggtctttggacccagggaaaaggccactttcaatgccgtgtatatatgggcaaccccttccaggcaggtataagtcacaatcaaatattcagaaacttgtgagtaacttcctgtcttaatctatctgaaacttctgtgtgacctcatttaaatgttgaagtagctacaagctcaaagttatcaactgcaacattattcagaattgcaaatatgaagagtgaaagtagagaaaatgcttgagaaaattgtgatacagcaactgaatgaagcagctcatggaaaatgctaattctgaaaactgtagcacataacaaatacttgtgaaaaaaatcaagatccaaacctgcaggagaaaaaatattcagaagagaaaaaaataaactgctagtaatgatgttgttcttttctctattgtctacgttttatataatattcttatatttcttttataatgatttttttaaaatataaagcagcctaaaggtgaaatatgtgtcctgatgaaggcagaggcaaaaattaccctaaacaaataatggccctatttatgtgtttgtttctgctactgtagattccattttcttcctaattgtatttcagtttgtgtggtatattcattttgcttattaagcctgtcctcagccttccctttgcccacacccctcctcactccctggatctgtgggacgtattgtgatgtctgcccgctaattttgctgtgactggggctggtgtctggttggtgattcatgtttgttccaaagttgtacatctgtgttggttgctttgaagcagtgccccagggaatatgaaaggccatttgtctccctaagactgcttctttgcatcagagacttcttccctggcttcgtttaaattccagcaagctctcctgagtttaagtagggtaagaaggaaagaaaacaaaagcaaacaggggcatcatggagagatcattggagtcagggtctaaccccagtttacctggcataagtgaacttcttggattctaatactagggacagaatgcctatgacactcattttaagggtaatgctttgtggacttaccctctgcccactaggaatgcctttagcaaaaaagaaggcagaatgagccttggtggaaaccctgaatggaaagagttctaagagctcggtgggcatacccacttggcacctgctctaagattttagcacagatacacacagcagtggtattcataatatttaatgactggcactgcatgagcactgatgaattaatggacacaggcacagtgcttccagacaccaatcctttagttactggatcaccaagaagtccagctgaccctggagggcctggggcagtggatggatgctaacagttttaaaagtatgttagtgttttaatatccagaaaggttgcacagatacataccagatgaataacaacataaatacatgaaatttctaaactcatgcccaccattaagttttgtgtaatcccctcttcactttttaagaacctacctactttgcccttaaaaatagttcagagcccatgacctactgtttctaggggtttgggtggcacacaaaaaagcccttatccacagaggggctttttattttgctcaactacgatagatctcacccaagggaagtttgcaagtcgctttattatatttttgcttgctgcaatgtatgtggctaacaacgtagctctgcctccaggcaggctggcaagcaggctgctagtatgagtgattgtccacctgcctgtctgcctgcagtctttgaaaggcagccccatcccagaccattagcctactgagaaaattcatctacagtaccttgaaagaccaaacatattggattgttatagcttttctttggccttttacccagacattatcattttctgcttcttatcagacacctggagtttgtgggttgtctaaaagcagcttctgtgaatggtctctggggaagccttataaccctgccttctgtcatttcttctcctcatgtttcaaggaaacctacagcttcagggtaatttgctgcctccccgttttcattcaagagagcagccaaggttgcttatagtctaactggctctttatgtaccaaattacttttggttgaattcagagactaaagaggaatttcactcagttatctattgggccattctggagttctgtcattaggaaagtctgaggttgtaaagaaattagttgcaagacatgagtcttccaattctgctctgcaagttactagcctatgactctgagaaaggtatttacatcttgctaagcctcatttacctcaaatgtagagtaggatcattttatatacttcacagggttgttaggagtaaatggaataatgtattgggaagcactttgtaaagtgaagaaatataagcaaaatccacccaaagtgagctggttgtaagaactagtgaaaggaaagaaccaagaatgtagacataaatcatggccgctgaattggtatacaggaaattcactgttgtggtctaatttgaaaaaaggagcatcctcagccccatatcttttgttcaccatctctctgcaaagctttagctggggagcagtgagagttctggagaaatactagggaagaggattactgtcaatttgaggctaagagagattgtgtgtgcaggaaaaaatgcatatgtaatgataaaggagaatgtgaaaagggcacagtgcccagggaaataccaggagcgtggatacagaaaacaagagacaaaatctctactgctcccgtctgtgtgttcattgatcagagcatgttcaaataattctgggcttgagggcacctttctagagtgacgaagaccgataggaaacctcatgacactcctctgtgggagccagtgaatgcatcctcccccagagacaaagctctgcagccttggagagtaatttggtgttagcagattaattaagtcattttctgtggttaaatttgcagatgaatattaaatctcaggctgggcctcccatctaataacccagtggaggttgtcaggataacactttgttcctgaaacatttagaaatacgtgtattgtatatttaatgagactgtgatatttattcatgacaggaagaagtcttccagacaggaagactttactcatgtgatagttcagggtctgacacctagagctgtgctgaatgccccctctaaagttgcttattatcaccaagttgttgtatgcctggcaccaacgccgaatttgtccaagttactcatgtcactgaaaggccatggagtttgctcctgggttcaaattctggctccattatttgctaatggtgggcatgggtaaataactgaacttcagtgcgactcagtttcctatacataacatgaaaataataatgactgcaactctaagctgtgttgaggatgaaaactttccatagtacatacagttttatgtaaaatgcttagtgtatagtacctgccacacgttggttctcagtgtatactatgtgtcctcctccatggttatcatgtgaccagagtttcccactttctctttaagctttgatgtggaaaatggcccttccccaggtcggagtccactggatccccaggccagctcttccgctgggctggtacttcacgccacctttcctgggcacagccagcgcagagagtcatttctctacagatcagacagcgactatgacttgtcaccaaaggcgatgtcgagaaactcttctcttccaagcgagcagtaagtacaagctctgtctggcttccagtttcacatttacctcatctctacccaggtcacagtggcagcaacaacaattccccattaatctatggtaaggatgaaggaagaaaatgaatatgagcaggggtgacgtgatgaccattttaaggacattaatgctctatagcatgcggaatatgtagctggggtctccaagggttttggaaaacctagacacagtgtttactttacatcttttactgataccttaaaaaaattattttgcttcatttcctgaactgttgagtcatttatggcatgagaaccttaacactttttatacatcacacttgaaatttcagctgtgtgtgcagttttcatgaggctccagcaaagaggaaaaatggtgattggttatatgcatgctgtctcagtagcctttgcttggtgactttaataagatgtcattcagacacatgcctgtgtcccttctctgaaactttaacacaatgcccacttgttgcctggctccttggtgagacacaacacactccaccgccctgtaaagcactgctgatatttttgttttgccgctattaattgtaaatctctaaattttatttaaagaacaagatctaggttgtgtcacccatttattaaatttccaaaaccaaataaaattggattctggaattcatgccttaaaaggtttctgggcacagatacaattgtttttatattatatgtcataaaagtatcagtagctccctaaggtctccagtttggaaaattccactctgttctcttctgctattggaagggaagtcaaaaatttcaccctctggtgaaagggggaattttgaagctaccagcaaaaaaatattccttgaggcatttctgccagcacattttaatagacgcacccctgccctaaaatatctcaatcattgtgtgggcccaaattcatttttcagtcatttggcaaaatttactgattctctcctttgtgccacacattgtgtcaatctctggtgataaaagacaaacaaaacagtgtaaaaatcacagatgagttaaaagcatatctcattctcaaaaaatgtgcatgctgtcagggaggttacagctaaataagaaagataagaggaacacacacatacaaacataacagagtgaaaggaaataacatttaatgagcacttcccatggagccgagctcatgttcttatgttatctctgttaatctgtcaggtaggtgtctttattatccccactccatagatgatgaaactgggactctgagagattgagaaacttgcccctatcccatgactgtgtatcatgctgtgtcccatgatgtggctaagcctgaccatattaaaaacttttggaatctttccatccatgttcttcaaattgcaaagtggcatctctaccactaggtagaaaacaaatgactgcagagtagaggtgtccaaggctgcaggagaggtaggtagccagcaactttgctgtagatcttgtagaacccaaggcatttctgacaaaagtttgaatgggggtctttgaatgcaaagatattgggaattctttccttcaccaagataaacacctttctaggcttcatcatggaagaccgtaggtcatgtggtgagctcaaagtaattagagcttaattcacatagtattttacaggtgcaagattagctttgaaatcttgtcattccccaaaaactaattccctggctaagagctctccagactcaagccaaacggcaggaagaatctcaaggtcattcagagtcgccccagaaaactctactgcacttccagattaaatcttgtgtttcattatttggaatcaaaaggttgtagaaatgttaaatttgaagagaccttaaagatcacaatccaactgaatctacggcagtcaaaaaagaggtgtagttctaaatgacaccgcatccagcatccctgttactggtagtttactgtcctttcaattttactggccagtaaaattccccaccacccgccccaccccctgcccccagtaactttagaacctaaattttccaactttaaatttaggcaagtaaaaattatatatgtaaattatttaatatcattctcactttttaaagataaggacttagataaaaagtagtatgggcacaatttcataataaaaagcagcctttcccaagaaaacaaggttggcaacataataccaccctatcaaaaatactgataacaggatatattaaaatctttgtgtgaatgaaaatagcacaagattttgttttccaaatatttcagtaccacagaaaaaaacttttatatatttgtcagttttggaattatatttcacaacacgctgagaagtagagtttgaataatattaagcttcttctagtaatttagttttaagttggcaaatccagtttcacataaatatctgaatctgaactaaagtaatgctcttaaagctatttcatatgattattaactctttaagatgaatcgaaacagaggaacagcagctccccacacttcccgcccctttttttgccttctacccatagatccaggaagcaagaagggtgctaatagaccaagagtctagatgtgaaggccactgggtgggggctgccggatgttccctgctcacagacctcatacccagcacagagctgtcatgaattttttatgaatggtggaaaactttgcataattctactgcattaaatcctagtaataaaggaaacactagcttttaaatttttctcatctgaattttttcagaagagtaacagaaaattatagtcaggggagagtgagtgaaaagatattaagagtaaaaatgtgaacaagaaaaattaaaagtagctttaactttgagcaacaaaggagaggatcagaataaggctttatagtgaagtaaagcaagatcaccattgggtcccaaaaggcaatttcagatgctttcctagatgtggcaatagtttgctggtttctgttcagttcctgtgttgtagtcatcccaaacgtaatgccttcgtatactgaggtacagattgcctcatgggaacataaagtactggaaactagtaaggccagttttactgctgaaaactgtggcaggaaccaccatggacagaatggagttttgattatccacctgcaaagccacaggaaaggaaactccatgttttttttcatttggtcatcccattttgcaaagccttacacagacaagaagcttttgaaagccaccatttacgtgtggactaagtagtctctagagagagcctactcattttcaagggaaatgagacctaagaaccaagaggaaaagcagaaataataatccacttaaatttaaaacctgtttattgatggactagcaaaaagtgcagtgtggtttctaagacttgagttagacttacaccatcacacttactagcaccatggcttttaagacattgaatctcttttattgtctctaaattatctgtaagtaaaagcacacatttattgagtattttctgtatgctatctgttaaaatactttacatatgttaattcatttaatctccatatccccaatgtggtaggtactataactttcttgttttaatgatgaggatattagggcacagagaagttaagtgacttctccaataaatgggaacaagacgaacccaagaagtctaggaggtaaactatatggatatccagtatgtaaacagactctaagtgaggctgaaaaatacaaaataatgctattaatttctgttctgcctacctttccagctgttaggaggatcatattcattctctcttttaataagtatgtaaatttaggaactttgtgaacaaataagacagtttctgtgtcttcaagggtacggaaacattagaagtcaataggcaattttagcagtttcagataagggcaggcatagagagctatgcactggtttgaaaggtctggccaggcaggaaagcagcctactctgaggaggttacagctcagctagaggagtcaggcaggcagaggaagtgcaggagaggccaggtgctaactaatcctccagttagtgtgggagcattttggagaaccacagctcagtgtggttgatccagaggatatgagaggatgaggaagtggtgaaaaacaagactggaaaagtgagcaggaacctcatcatgaagggcctatgttaaggaattggcctttatgttgcaagtggagagttactaagcagataaacatataatgcaacattttaaaaaaatagctctgattgcagtatagaaaatggtttaaagggtagggaagcttaaaggctagtactcaaacctacagagccaaacaggaggctgccatgatattcatgtaaaagaggatggggatttatattacagatgatctagtgagcagttagtacatatttgcaagtcaggatcagcaggagttagtgtttaattgaaggataaggaagagggaggtttcaggcttggtcgagaagataggtggttgcactatttcctgggatcaggagcattctcttactacatgaaataatgtacatgaaagtgctttgtaaactgtaaatataacataaatatgagtcctcttgattgcaatggacagacatgaattaagattaaagaagctctcatcagctggaaatacagacatgcaaccctttaattatggatgcccttcaacttacaatgtcccaaaaagcccatcctaagttgaaaatgcatttaacacacctaacctaccaaacattacagcttaacctaacctaccttaaatgtgctcagaacacttacattagtgtacagttgggcaaatcatccaaagcaaagcctattttataataaagtgttcgatatctcatgtaattgaatactgtactgaaagtgaaaaacaggaaggttgtatgggtactcaaagtatagtttctgctgaatgcatatggcttttgcgccattgtgaactcaaaaattgtaaattgggcagggcgtggtggcctgtaatcccagcactttgggaggctaaggtgggtggatcgcttgagtttgagaccagcctggacaacgtggcgaagccctgtctctacaaaaaatacaaaaacttagctaggagtagtggtgcgtgcttgtggtcccagctcctcaggaggctgagatagcaggatcacttgagccagagaggtggaggttgcaataagctaagattgtgccactgcactccagtctaggtaatagagtgagactctgtctccaaaaaataaataaataaataaaataagtaaaataatcgttaagttgaggaccatccatataaaaataaagatacctactggtattgataataactataactcaataactaatctgcttttatgtgctaagcactgttatcaagagttgtacatatgtaataattaatttaattttcacagaaccctgtttgacaggtaaaaatgttgagacatggagaggttacctaatgtcgcatagctagtaataatgcagctgagaaacaaaccaattcactttggctccaaaatctgtgctgttaaccactatagtatatatctctccatatgacagacaaaaattaaggaaattacaagttaatttctgtgtgtagtgagaaaacagagaaaggtggaatgaattaataaaattcagagtgtggcagtgaaaggcagtatttctgctttctagaaaatcattttattgtttagagcagacctacatacactcaattctatgactcagtactaagactggagtgctcatttcgttattctacaaatttgtaatgtgctggctttgtcactagatgttgctcttgcaatgcaatgattctgaatatctggacttgctcctgagaggcattgccttctccaggggtttgggaaagtaagaagtgtatcagttttcataatcaatcaaatgttttataatttctatgccatttgattcttaactagtgatttatcaaattatgatttttaaaaatttataatagttccataaataatctggttgcactctaagagaagttttttgttttgttttgtttcttttctgttactttctataaattatctgatagattctctaatagcaattttctaacatacagcattagctttggcagctcaaattgtttaagggaaccaatgctgggcatctgtaaaatccattttttgcttctgaatgttctgttctcctaaacttcaaaagttccataatgataaagtcatgttgacattatgccctattaatgtttctttatctccctttaatctttggattgtacagttttaataactcctccaactcattcaacagtacatcagctcaaggtaccacctatgcatgagatttacttatattaattagcttttattagatactagactctggaaatccgggagtcatagaagatgcacttaaatctaaatccgttatcttgtcccaaattcatcctgttgtcttatgaacaatgtgaacttcacatcagaaatcagaacacttcacttgactagcctaaaaaaaaagaaagaaagaagaaaagcaagaaagcaagaaagaaggaaagaaaagaatcagaacaaaccacaagatcttcacccatctcaaagttcatcttgggaaaaaaggttggaaagggtcagtttctgatacagttcaccacactccatttatcacaactgctcctgtcttgattattttttcttttttgtatctctccaagaaccctgaggctcttcctttggctccctatttatatgtacccccacctcatggggccacttcctgccatggccttaactatccctacttttgtaggaaacccctaaatctatagctcgaattcccatatctcagtcttcctgctcgatgtctccacccggatacaaatcagtacctttaagttcaacgtgtaccttaaaaactcagtgactaccttaaactcccccaacaggaggggaaactcctcatttccttatttctactcacggcttcactgttttctcagatatccattttttaaattgaaaattatatttctttatgaccccttatccaattaaatgtcaagttctgcaaaacctctgggctctcttcaagttgtctcattctgtccctttcttgacattacctattggttctcatcagaatgggtgcaatttctaactattctttccaggtctgtccccactccaatctatccctccacatccaaggcattttactttctaaaacacttttctgttggcccatctcactttccatctcactaaaaaccttccctggctcctttctctctcctctctctttttcttttcttttctcttttcttttcttttctttcattctttttttcttttctttttttctctttctttctttctctttctttctttttgagacaaagtgtcactcttattgcccaggctggagtgcaatagtgcgatcatggctcactgcaacctctgcctcctgggttcaagcaattctcctgcctcagcctcccaagtagctaggattacaggcatgtaccaccacacccagctaattttgtatttttttttagtagagacagggttcctccatgttgatcagactggtctcaaactcccaacctcaggtgatccgcctgcctcggcctcccaaagtgctgggattacaggcataagccaccacgcccagcctgggtgatttctttctatggagttaagtactgactctataatctttgtctggactgtccataatatgagcgtgggaggccttctatccttattctctacaaatgtctatagctaatatgctctgctccacccaaatagccatcaaacatcttaataagcgtgttcagtattttcccatttcagtacctttgttcctgccatttctcttcattggcagcatctaccatccctgactttttaaatccttcaaagttcctctgaaacactgctcactcaatcaagactttcctactttctctaacctgtaattgtcatgtttcctttggacttcatgaagtatacccattgtttttaattctcattctgtattaaaatgtctattacagtttttaaaatattttttgtttcccctactttgtttcagttttggagttcatggatattttgtatgatttgatatgtcaactatgcagcaagtcataaaataggaagcataggctgggtgtagtggtttacacctgtaactccagcacttgggaggccaaagtgggccgattgcttgagcccagggcttgagagcagcctgggcaacatggcaaaactctgcctctacagaaaaatacaaaaataaataaataaaatagctgcgtgtggtgttgtgtgcctgtagtcccagctactccagagtctgaggtgggaggattgcttgagcctggaggcagaagttgcggtgagctgagatcactccactacactccagcctgggtgacaaagctagaccctgtctcaaaacaaaacaaaataatgacaacaacagcaaaaatgaagcatagtgtttaaaagcacagatttttgaaaccaaacagtctaaattcttacacttggaatcagtctcagttcttctacttactaggtatgtgctagttaactgctctgtggatcgatgtcatttatataatagcaatattaagagtacctgacacacagccctgttacaataattaaatgagataatacatgtaaactgcttaccacaagacctggcagacaacagtagtgacacaaataatgcttactccttgtcagtattctttttattgtcactgtacagagtgggcacagaagacacttgccagattaaattgaagtttggaggtttctagctgaagaaaaaggtggaaataaaagtatcatattaaataagatgtcaagttaaaagcctatgacagaggagaggcccaaatggatgcatgtgttgttcgactctggagccccaggcctcgtgtggtgcctggtacagggcacatgattaataattattggttgcactaatgtagttaacaaagaaggtgccatatttgtgtgacaatgatgaggacagggaaggtaggccagacactgagggaagttcactgttactaatttctgtgctgctatgatgattcacactgtaatagcaaagtggcctgattttgtgactgtagctcaaaccaacatgtcttctagtaccttcaatagagagtttgctgaatgtgggtttaagtagatttctcaaagtatgtgccagagagacagtgtgcacttctgaaaacacatttttgactcttcctaaatacagatttacataacactaggtacagcttaatctgttctttgggacaaaatggagtgacaatggtatgattatggcaggttcagccatacactcctattaaaagcttttccttaggtactttaagaaaaagttatattacaaacaaaaagtaatgggattcccagacagaaatctgtgtttaaatggcattaaagctgtggttcgaatcaacaaaagccaggaaatccaaagttaacctttatccagactgttataccagtttttccaactgtgtgtgtccctgtgagcagccctccctttgaatttcctggctctggcaaccaaaatccacaagtcgctttgaattacagtactctggatctgttatttaatgggaatatatcctgaggatatatgcttacttgcaaatgcttttatgtgtagtcactgtaaattcaggagtcatgaatctagtactaattttttcctttcaagctcttggaataccctttcgtgccaaattgtgagtcctgtcttatatccaggtagaagaacttgtataacatttgtgttgttaacactgataaaatttaatattatagcttatatgtcacagttataattcaagtaaatttctaaaggttctttttttctcttttcaccagacacggcgatgacttgattgtaactccttttgcccaggtatgtattatgctggccctggcttgctttcactgtcgctggtttctaagtctgaacctggccatttgtcttcttttgtccttaaccgtttaaaacatttttcttctaggtccttgccagcttgcgaagtgtgagaaacaacttcactatactgacaaaccttcatggtacatctaacaagtaaggattgacttttttgtggagtttgaatccctaacataaaggcaaaaaatattgagcagcatttaaaaaaatacaactattacatggaaaattgtcctctaagctaagttaatatacacaataaaatttgaaaacaggatggagcaccatagtattttagaactcatacaacactataagtaacctagtctgggtcttattcgtctttgtacccataagactcagtaccaagtagaaattcacaaatgaaagaacaaaaggaagatttaattttcgttgacttttacatttactactttgaccagtaactgccataaattctattaaaattctttttgaataagttattaatgaattcagatattcaaacttaaaattaaatgtagcaaaaagttcaagttcaatttgcctaatttttgattgtctataaacaagttcatgcagtttaatgaataagagtgggattatcttctcctccaccttcaattaattatatgatcttggcatttaaattaatgttgctgatccttgatctccgtatctataaaatgaagggtttgaactttatattccttgcagtaacactttctccaaaatcatttcgaatctatgagcttaagctaagttctattcggttcactcttctgcatgttttaaaacagtatcacaaaggtcagagagtcatagaacccgtgatcctggaatgagaggactggaggaggcctttgagaccattgattctcttgtttagtagaaacctaagctctcaagaatccagtgacttgctaacaaccccctccccccgcataagttagagacacagcagggccaaaacctgtatctaatttttcagccagtgttcactacagagtatcctatatctccagtctttgtgaagttatttttcagtcctttactttgctttcacacacattttcatagaatagtttcattaaaagtgggagtaaaccctgctttgaatgtttgctttttctttcactgttttatgactaggctttcttgtgagatgactctgtatactctgatcaaacttccatgtgagtgatctttctcacatgttgtatgactgtgtcaccctccagcttgaggcatttcagtggtccagtgttatcattaagataaagtttaaatgctggtgcttggcactcaagacaaattaatttgattgatagttgcttgggtttatatgtagtgcaatgtatatgaaatctagaggcttgtctcagcctcttttgggtagaactccatttatttatttatttatgtatttacttatctatttatccatccaactagtatttatttagtacataccatccattcatacatggatatatgcatttaacaaataactactgggcacccccatcagtaccaggcactggtaatataatagtgaccagagcagacaagtcctctcctcttttagggcttacattctaatacaaaatgctgtaggatgcagtgtaaacaatcagaccaggtctctagccacatggaattatgttcaataatcatggtctgttgttctctgcatactctcttctctatcctaattatggacttactgttctttcttcctaaaatgtctgtttccacttgccagtgtctgcttggccaaatcctgattgtctatgtcccatctctagtatcaccttcactgagatgctttccctgacctcaccaaacctggctgagtggccctcatttggatccagagtactctgaaaaccttatcactatctttatggatctctgcccaccactagactgtgtgccctttaggagtaagaattgggtttagtttttcttgaattcccaagaatagcagaatgcctgacatacagtttgtgcttcataaaaattcatcacatatatgaacttctgaataaataattgttggaggaaagaccaccaattatttagaaaattatatttgcaggattgattccttctctatgtttttttctttgtagaatatggcctctggcttcatagcccatttctacccccttgaaaatgatgcacttgggcaagctaattactctctctatatctcagttttctaatgtgtaaaatagggttgttatgaggattaaatgaattgatatttgcaaagcacttaaaacagcatcttgcacaaagtaggtgctcaataaatgtgagctattataatggatcgttacatttctcttgctgaatccagaagtggtgtaacactttggggttttcatatctgttgtcagcttagatcaccataaatgatattcatggtattgaacaaataaaggtattgttacccccactctatggataaggaaacaaaacttagggagaataaatgacttgggcaagaacgtacagcttccagtgggcaacagagttttccttgaaacctgtaatcctgactgtcactgcagtgctcttttcatttgccaaacctgttaagtcttctgggttataggaagaagtccctggaaggctttggaacagaaagacatttaggaagaacttatggaatagatgaaggtcagaaagcctgaagacagagacagtagctaaaacaatattttcaggaattaaacatgagggtatagctctaaaccagaatgatggagatggcaatggggaggaagggattaatatggacacattttaaaggcttcttaagcatggctggactgagaaccactacattgcacagcactagggagaaggcggggtgggtggtggtgttctcattcttatttgttagcatgggtttgaaggttttttacctctgttagtagtatcagaacattcagcccaaccctgctgattaataagctgtgccaactgaaacaactttctcaataatcaggcctttccaaacccttgagggttttggtccttgtgaacttttaggaaccaagtaccccaagaccataattgccatagcacagctgaagcacagcccttcccacactctggctgaggactacccttcaaatcacggccccttgtgtcacccttggtccaaagcaagccatgcttatcacaaaaagcaggcctccagtggtaagatagttgtatctaatgatctttctcaaattcatacccatgtgtacagagttgatcctgttactgattgcaagtactaccttgtcaccaacaaaaattcaagagagggcacatttaccactagagcttcaccaaagggagttgagagtggtgcagtctagctcagactcagtcctgaataatggatttcagacatcagggagctgaaatcaatgaaatcaattagccatctctggagcagtctggcaggggcaggctggaaaactgagtgtccatttaatgcactccattttatttctagatagtgaataccttcaaacaactaaagaaaagccaagagaaggaactgaagacaataatgtttggcaggaatggatacaacatacagaaagcatacccccacccgaacacacacacagacacacacacaaacactcacacatatacacagagttatcttaacagctgaaactgtagaattcatggaactcagatattcctttctgatatacttgacttcagatccagggtgccactccctgccttgaatgtagcatttaagcaataattgtgtcctaggagtggttttcatgagacatctggttagtgtggtttattgtaggaaaaggaactcccacatagaactatacttctcataagtcaagatttcttttatcttttggctctttgctgtgcataaaagcagtccattgtctgcttgtgctttaccactcaaagggtggaaatctcaaagttcctgttgaggtggtttccttgcaccttcatgaaatatcccattgagggatgcttgattggacctgtatttcttggctgcaaattaaaacctacacttcctttgtcccaggagttaattttgaaaatatggctttcatttagagttgttaattcagataagcgttcttaaagcacttgctgactttaaacagactgctggagtaatcaggtgcgcaagtgagtgtgcccaccattcagcagtctgatagccaggggatggagctgggagcaaataggtgtcatttatcaatcgactctgtcatcaacatcatgaatgtcacctgtggctatcaggaaataatgtaacttctttgtattaacattcttccaaagcataatttaatgaacatgtatgtaatcttcaggaaagaactaataaccacttaatttttttagtgcatatctatccaaaatgtcttttattgctgtatgtactttggcatgtgaattaaattaactgaggatcataaaatgtttagcgttcagagctggaatgaacctagccaaatttcctcagatgaagtgaagcaacataggtaaaactcctcacacaggactcagtacgttgtaaatcaccagtaaatgttagttgctgcctgctcttctcaagtgaggaagaaactaggaggttccgtgaattgcccaagggctatacagtgggaaggtgccagagccaggattaggattcctgtcttcttagtcacagtccagttctgtctccactgtgctattcagggctggaaagtatgaactgctatggccatattatcttccctatttatatcaccatcttcagcaatcagccacgtaacttcttatgattcttccataagttacggactttggaaactgagcaaccaataccactttcctctggcattccttacaattttctgtctggcattctcatgccctacaagcaatcatgtggcttgcagaagtcatttattcattgaaaatgtattgagcctcttctttgcaccaggtctcatgaataattgacaaaccaaataaacatggtccctgcctttccaaagcttccacacagagatgcttatctgaattgacaactctaaataaagccatattttcaaaattaacttctgagacaaaagaatttgtatagtatgagtaatttccaagaagtcattgagagaattaggcactgtgatttgacacgctataaagaaagtagagatttctgacatttggggtctcctagttcagtttcttctttcacaaaagtcttctttggaactcaggaaaaggtgtaagataaaattattaaaatgcattattaatccagtgcgtatgtgttgagtacctccatcatagcaaatattatgccagatccctgtgttacagtggtgcacaatgttcaatcattgcttaaatttctcatagatgagttgaagagaaagacaggaaaatgggaaatacaatatagaatgagcaatgcagtggttcagtaagcacaggaaactacagaacacaggtgagggccactcacagagggaaggctcctctgaggaggtgatgcctgagcagagtcctaggacatatgaaagagctagccacataaagagaagaaaagtatccaactgagcaaaatgtgtgcaaaggcacagcaacaaaagagagtgctgtgttcgaggaacagcaagtggcatatagaaccaagactgtatgtgaaaaggaaaccagataaaatattcatatagagtatttggttctcaaatcactttcacatcagtgggttattcaatctacattctattaacattttggagttcctactatttgccaggcaatatggcgggacctgaagagtatgtaagcaaagagatcagaactggatcctgccatcaacaggtcacagattaccagtggagataatatgtgccaatatggactgtaacatgaagaaatgaccctaaaggtacaaataaagcaccatgagagattaaagagaccattcttggctaagaggatggcatcctttggagaaggtttgatgggtaacttaaccttaagttaaccttaacttaacctttgatgggtagattgtttggtgtggagacagcttccttgacaggggaatgaatggcctgaataatggcaggaaaggggcagcacatattcaaggaaaaagaagtgttcaagtttggccttggcaagtgtgagtcagctctgtccctcattcattcactcttctattcaataagtatttactgaatgcttgtcatatgaaggaccatcctgggtgccagggatcaagcggtaaacaagttgttccctgctcacataatgtttacatttaatcaaaggaactatgtattgaacactaactagacagagcctatttaagctataattttaaagtgctacaaaagagaagtacaggatgcatgagagcacagagccagtcagtggtctgagatgaaatgtcaggcaatgaggaattatgagagataagctgggaaaaggatgttggggctagagagcaaagactttgaatgccaggctaaggattttggaatttaatctcttaattttcctgaaaaacagccctcagtattagtgcaggtgttatcagcatatagtatagtggaaagagcatgcactttgggttcagaaagacttagctttgaattctggctgtgccaattataaatcatgtgtcagtatgtttcttaaactctctgagcttcagttttcttatccttaaaatggggtgataatactcccagtggaagctaagaaatacctagcacagcctagcagagaaaagcaatcactatatgataatttcccttctcttgtcacatgtgaaaatttcataccactgagagtttaaaagtaccctgcctaagatcacccagctagtaaattaatggtagatgtggaccctgtctatagactacggctactaggtatgggtacctacaagctagattgtccctaaaggaccagagattaattcagagcagtagaaaaacctagggaattaattctgtggccacaccagtaggaagactcttctttagcaacaacgatgcaggctgttctttgtcatttagaatttggcttcgttctcacgcttgcctgtgcaagagaatgcaaaaagaagtgaaaactacagattcccaggcctcatctcggatatactgaaatagactcttcagggttggaaaaagaaatttaatagctccccagatgagtcggctgcgtatccatgtttgagaaccactggactagagtctcactctcttgctcattgcaaatgtcctgttactccttagtggagcagagaatccttaatgccagtgtttctgaaaatgtggtcctcagaccagcagcatcagcaccacttgggaactttttataagggcaaacttttaagcccatcccaggcctactgaatcagcaactctgggggtagggcccagcagtgtgtctgaataagacttccaggtgattctgatgcaccctaaaatttgagagccccgctcaatagtattcctgagaagttttccagcagtgcatcaggaaacaggagagtctggtagaagttctgcaaaacatgagaagaagggtaagagcagtgaaattgaaaggttaggggcagagaaaggaaaagaaacaagaaaaaaggaggagccccagtactatgggaacatgggtttgcttgtttcatttaacccctgacatcagcaggcttgttatgatgtagaatgacgtcccagttcctccatgaaaattctgttccctaagtaaagcaagctggatgactgttcccagtggttgtgtgaccttggcaagtgacttcacctctctaggtctctgtctcctgaggtacaaaaattaggggcctgaagtgattgatcgccaagggttcctctggctataactttttacagcactgcccaaaggaattgagattcactctggcatttcgagtgatgcctgagcaagtgactctttttctcagggcttcttggaacagcaaaacttaaaacagggggctggtttgggacctggagtaaacaacttccttcctggagagtctgagcatcctgaggacttgcagagggaaattccaggccatctggatgtgagagaattgcagtcatctacccgggttacaggagcttgccttccggagatggcattatgtcactacatagttcattatgacctggaaaagtcctcagtaaccatgagggtggggtgtcgggggtggaatgggcagttttgatacacagactcagtccttcttttctctgtctccacaggaggtccccagctgctagtcagcctcctgtctccagagtcaacccacaaggtaggccatgtcataaggtctatctagatgtttcaagatagaataataaacatgcctcttattcagaactgttttttagaacaatagtgttgtttgcatattgtggctctcaaaagtatgtctcttggtgacttttttctaaggtacactggagcattacttcactctattaaaaccacattaaaagcagtactaaataatttgcccattgtatgtgcaggctttcagaatatgataaacatggggtaatgctgcctcttccccaaagaggagcaggagacagagttgtattgacagtgcagcttgacctcagcttgctggccccaataaactccaggagagctaacatcgaagacctaaggtgctccacgttcgcctgagggcccctgcggatatgttagtggtttccctcttaatgtcaactatagattccacttgaatctacatcctttccaggtgtgaaaccaaaggctctttccaggtcacgaatcatttcttttggagggcatccaactttgttcctcaacggtgttttgttttgttttgttttttgttttttaagaacctaacctctcatctttcaggacagtgcatccacttttcttggtgtgttgagagctgcagagaggaagggccaccttgaaggaacaccatggagttctgttggaactgaaattcttcttcacacaaaatgcaaccagttctatgatatttgttaaagtccaaataatgttttctcctaaatctgttccctactaatgtagcagtagatttgagaaaaaccacaggagaaacaattaagatgaactcacactgagatcacctaatgcctgacacctaacgatgcctcacatgcttttctatttccagcagcgcttcatacttaaaatctttctctcttggttgttgtgttttctttctggtatcctgatcataagtataacggaagtattacaaaagcttagcttctaaaagaagggaacaaaagcagcagattctattggctcattggcttctgaagtatttgtggtgcatgctttttaaaatatttttataaaagaaagattgagaacgagaaaaaaaagtgaaagaaagatactaagtaaaggtgagtttactctagagcctcgtaatatgaaatataaagaagtaaacagtactctatggacttcaaaaacctggtgtgctgcatgtactatttcttttagaacttttataaaaagaaacaaaataggatgttttaacatataactcgtgttacatacttggagatcgaaggaggtagttttgaaactccaatcatttcatcatattggcctaccagtgaggcaatgttgctcacatttctgttagccaaatttacatcaatttgattatttagactatgttttctttttcttgtaataaatactgacaaacattaggagaatatgtacaatttatggttctataaattagctcattaaccaaagatgtggttggaaagatccttttgtgattattggcacagcaactacagcttgacaactagggattcttttgataaagtcttctcaaacaatggagcaaagaaatgacagtaccactcaggcaatttgtttccttctgtctctgtggcaaactacaaaaatcttggcttttcactgggaagagaatgtagtgataccaattactacgtaattacgggtttcaaaatctccttaacgtttagccacggttagaaaaggaaggaggagacacacatcccttgttttgttcttattatcagcttaaataagtcaggcagatttttcctgttattttaatatttatcagcatatgacaaagaggtgtgtttaaatagaaactttaaaggggaatgaaaaataactggctcagagcaaacagaattgagaactggagtgctgcttcaaaatatgatttttcatgatagtaagatcaggtttttatttctcagtactgaagttgaattcatgtatttcaattgaaatctaagataaaaggtacaagaaatctacatcaatttaaacagatttagcaacaacctagtttgctcagaaagcctgacttagataactgtattcttgtattggagcaattcagagagagagagagaaataccaaatcttaaaatgctttattattttgaacatataaatgagaaaaaatgcaatttattttaaaagctaattgtcagaaaccatggtaaattggtacatttacttttacaaattgattattaactgaaatattaaatggatacatcaaaggaaagctctccatttgaaatacccctcttcggccaggcatggtggctcatgcctgtaatcccaacactttgggaggccaaagcggacggatcacgaggtcaggagttcaagaccagcctgaccaatatggtgaaaccccatctctactaaaactacaaaaattagctgggtgtggtggcacgtgcctgttgtcccagctactcgggaggctgaggcaggagaatctcttgaacctgggaggcggaggttgcagtgagccgagatcgcaccactgaactcaagcccaggtgacagagcaagactccatctcaaaaaaaaaaaaaaaaaaaaaaaagaaagaaaaagaaaataaagaaagaaataccagaaatacccttcttctcactatccagccaaggttcttatcagctctcatggctcaatgcaaatgtccttactttgcaaagacatcttatttttttttaagttggcataattgctccttttttgtgctatggcaacaatttaattctctgatatactttaattcaaggcttcttgtgtgtctctcccattggagataaagctcttgaagacagggactgtgccttatctatctttttattactcatggtgctttcgcatagttattttcacatagtaagaacacagtaagtgttgaattgaccgggaaaactacataaaatttggggactttatgtgaagtaaaatacatataaaataaacttttaataatgagccaatatttttatctctattgctatgaaaattattcaaattgtgttttttcactgttaacaattagttattgcactgaagttaatagaggtttgaagcacactctataactgcttatatatgttagtgtgttcgtataggttttgaacaaaaagagtgaaatctaagaagttggcatttagcactttgaataagaaagccagagtagagcaatggagaatttcaagcccagaaagaacaacgaggaagccatatgctcccaggttgaggagaaagacgcagtaaatcctcctaggggtgtcgaaaatgccaatgttgtagtttaatgagcatctgaatttgtttcacattttgcctttcacaagcataaattccaggctctccctacatggtgctcaaggattgaaacagaaaggaaaaaatagaaaaagaaagaaaactccaaaataaggcaggaactcgaattctgtcacctgtacatattcacaacagaaaattgaagtaattctcaggatttcaggtcccaaaactatttgcaacaggaaaatggggtgcatgcatacacatgtgtgtgtgataattgtcgccttttttccattccatcctatcctttgctcttcaatagtaatcacacatatgtcatgacagtaagaatttactgaaaagataaattatcaagtgttcgctgtctttacaaaatgatttttttgctttatagaaggattggagaagcatccttttaatggctagcacatccgagtcatgtaaatgtgacttgatgtaaaataatatgtatcatgtatacaatattttagcagccaatttgatacataaggtggggtgctctctactaaatttctttttctaaaatttatcagtaaatttactgagcaggaacattaccactggtaacagatcagatgttatgaaaaacaccacagaagtctatgggtcactggaaatgacagcaaaccatagcaccaagatgactagggaatcactttgaggacttcaagccagattgctgcagatactaatgatatcaaagcctggatatccatagccttgatttatggtgattttcaacaccagtcaattagaatgcatttcaagaaaagactgtgttcagagaaatcgtatgagacatttcttttaatatgtgtctaggccattctggggaggaattggctttttaccaactgataaaacagaagaagaggctttctccttggaaacctatttctccatacaggttctgcccatagctttacttgattatgactatccctccggaggttcatgtgggtgtaccagatgcagggtctcttcaagtagtggacaagagggtcagtgagttatcttcgattttaaggaattcagaaagtcatgacattgattccgttctcattctttgccagaactttcaggacctgtgatgagacagggtctatatgtgcatgggtaaagggctctctgagaaccacagcaatagcctgagagcagtgctgcatcagatgactggaaatgaggcccagcacaagcagaacctttgcttggtttctacattaagcaagaactgtcaggcaggattacaacacttacggacaaataggaataaaatcaatcttgtgaccaaaggctctgaccagtcatgataaaggaaagattagagggaattataagaaaaaagaaaaaggaaagaaaagagataaaaaagaatggaaaaagaaaaagtcagaaatatcaaactatgttttcttccttattctgaattctgtgtgctgaattaatggaataattgccttaattactcgccttcagcgtttagacagcctgcatataaaatgatagcaaaaatgcaccagaaaagccccagttattttgagaataattttccaaatggttgttttgtaataattgcttttgtctaaaatagccctcttatgaaagtttaccccagagcatcaacactgagctgtttatattgatttgcagttatttcatacatatctaaaattaagtattggtactcgcaaaaacattaatacctcagctaaagtgcaaacgttaaaatgtttcccttaagcagatattgtcaaatataacaccctgcttattatggttatttcactagttcaaaattaatttgcaaatttagcataaatatttcttctctttgaatgaaaccgaggaggcctcatctaagttctcactagctgcctgaacagttgagtccgttccgtgttgactccacttcacatttttgtactgctgagaaacaacatccacccaccctccccttgaaagttggaatcatgcatgttagtaagtatttcagttatgctattgacgtcaatggagtcattaaatagattgctggccctcccagaggcaaatcgctgccagggacctagatacagacacgttttttacaaagacaaccatcaggttttgctatagcagtaagccagagaaagggaaaagtttatactgtagcagacctatctccaaacacagtttctttctttcttttgcattttagttccggcctttctttctctttggttacagtaggctcaagcagatacccagatactgttgcctgaatgttttgtgtgcaaaagcatctcctgtaattgagaccatgaagggaggtaccccacttttaaaaatgagtctcacattttgctctacacagcctatcttgatgttgacttggttgcataaattatttaggcaaatcactattgtctgccagtaaggtcgtgtttgatatatagttccctgaataaacagtctcctccaaacacacacacacttttgtactttctgccatccctgcgtggcatgtcgctgcatcccctcatctatgaatcaacctttttgcagctagcactgtgctgtagcatcagggatctgcagcaaagggtggaggaggaagctgggaagaaagcttcacttctctcagctgcctcatctgcagcgctcccacaggaggctgtccacgtgcctgtgtcctcccaaaccctagctgctgcctgcctcgagcctggtcatgcagctcccaggcatggcaggcagagccctttaggaaacatgtgcctctttctgggcattcttgacagctctatttacctgcacagccccaggagtcagagccagagattcgcctcacacatctggactcttccacctccaggatcgaagttagggagacatcttgagcagacagatttcttcaaatctggttgtcagaaactatcccattggttttagaacccatttctctcttcagtcctgtaccttcactccctggagacccccaacccccattacttatcagtaagtttgtatataaatgccagacatctgactacctctggtaaccccttttggttcatctggagacccaaattcattcacctacacaactgtccctttttctgtctttctgactttgagtagcatcttcatcatccacccttttatctccctcttcacctaccacagccaactcctttagtctttttctctaatctttttccttttctcccccacttcctctgcctttgtttattgttccatcatcctgtacctaaagcattgtggtggtcctccaacttgttattattgtcctcattctttccccactctaaaccagcttccattctggtactagaattctttttttttttttttttttttttttggagggacggagtctcactctgtcatcaggctggagtgcaatggcgcacaatcttggctcactgcaacctcagcctcccgggttcaagcgattttcctgcctcagcctcccatgtaactgggactacaggaccccaccaccgtgcccagctaattttttgtatttttagtagagacagggtttcaccatgttggccaagatggtctcaatctcttgaccttgtgatccgcccacctcagcctcccaaagtagaactattcttataaaccccagttatggttacattattttcttctttagctatactttgccttcaagataagacctaaatgtctcaccaggcatgcaaaagcctttagaattttgctctctttctttgtcctcatctcccactttacgctgccacccccctgcacaactgatggctgaagtgcactgaatatacatccctgaaatacaccaggatcttcttgctttcctgctttcatatatgctgtttcttctacctggttgccttttctccaaaatatcatttacatattcagctcagggattatttttcacattgtcactgtgaacaaattctatatatcatctgattcttggattcaggattaaaataaatatatagtctcaattcagggcctgggccctgatatatactatgtgcataggaaatactacttcctttacccatttccttctggaaagtgcattttaacccttcatcttcttgatataccttctgcaactcacccaaaattactgttaattattatctcaaaatctctgttattacacttgtcatactgtattgtaattatttcattttttcccattctaaactaaaagcatcccaagttcaaatactaatcctctttttctatatcctcaatttataacataaagcccgggacatagcaaatgctcaataaatgtttatggactgaacaaatagggatgaaataatgcccatgcctgaaccagataagattagaaaggaagtgaggctcatgttcagctttgttaaggcttactgaaatatctgctagctctcaggacatgtgcatagtgctgacatcccttgctaatcttgacaacgtgtgactttcaaggcacttgaagtgaactctttgttatccatcacttcaggaagaagtggcagtgttaaaagaaatggaagaaaaacaactaaatgaatttttatcatactatattgttctcttagtgcctggcattgtgcttgccacaaagtaggcactcaagtagcatattgaatggaattggtttgagaacccagttaatccttcagagaagttacttctctgagactcacttttcttgtctgaaaaatgggcattttttttttttttgagatagagtttcactcttgttgcccaggctagagagcaatggtacaatctcagctcactgcaacctctgcctgccaggttcaagtgagtctcctgcctcagcctcccaagtagctgggattacaggtatgcgtcacaacacccagctaatttttttttttttttatatatttttagtagagaaggagtttcaccatgttggtcaggctggtctcgaactcctgatctcaggtgatccaccctcctcggcctcccaaagtgctgggattacaggcatgagccactgcgcccagctgaaaatgggcattttaatattctatatgttaagattgttgtaagggctaaatgagaaaagctttatatagtgattaagagtgaagactctggagtcagactgcctctttcaaattccagccacaccactttgtgaccttgggacaaattgcttaacctctctgtgtcctaattgcctcgtctccaaaattaggatggaaattgtgtgttttggttgtaaggattaaatatgttaacatgtataaagcatgtagaaagtcccagtgttagtattggtgttattagtgttatataacatgactcagatagtactcagcacatagcaaaccaccaatgtgtggtagctaagatcccagccttctggtatcagtagagaaccacaacagaaagccctgttgagctctttctagaaggttctggtctactttgcttccataataataccatctgaagggagtaatttttgaagtttaagactttttttttcctcctgagactatagaaatcttgttatatagaaatagttttagagctgaaggtagagttctccagctcatacatgggaaagctgaaaagtcaggagggagaatggagctgacaccaaatataaagggacacccctaaatacagctttttctcttaaaagcagagtgcaaaaaaagattgtcaaattacttaggacttctggtaaaccaaatcttagttaactgaaagccctgtcttgcataagcctgacaggatgccactttatatgatagcatcattacagcttgtacagcacatcaaagttgtattgaaatacatgtttcagggttggtacacacctattcaggcataggtgttacaacccaggaagcttagcagggagtagcgctaggagctggtgcaaagcctccctttgcagagaggacaaaacccactagcagagtctgcaggaagggaagaggattggcccttttgggaaaaactttacaccctctccaattactgctgagaaggaaaaagcaacctcatacccatcttaacccattctcctctctttattggaagggagggagataaaaaaggaggttggagttagcctagagaagaatgaatatggaagtttgctaagagacaaggaaggaagaggaccaccgaagttcctttttctgcctcctgcttccccaagtgggtatgatcctgggggcagggtgaattctgcttgcttgcttctgatcaaccccgagccagcacattatgaagttgcctccagaactgttctcggaagccaggagcatttcagggaacagcctttcacccaagaggagggaaacaaagcagggactgtcccctcaaaatagagaacaggcaacagaactcactggatctttttcttggtttattgtcttgacttcctcccagtcagagctgttgacaagcaccaaaagcgaccccttggagttttctgtatttttcctaccccctgtctggctgtgtccacagagtaagctgggaccatggcgattatccagcttatttgaatcttacaggcagccaggtcagataatgctattttctctctgccccctcagttgtatttggggcttcaaatttctagggtctagtctggctagcactgctggtctaataaactagataatgtccaaagcccacatgtgtgcctctgatttcaggaaaggtaaggggctagtgcttattccatttctggtatgtgccaggcacagtgctagcccctttgaatatatcacgtcacctaattctccaaactaaacttctttgcgtatattattgcccctatttcacatatttggaaaaagaagattcaggaagtatgtggggctcactcaagaccacaaagttagtgatagaatcagaactgaaagctagatctgtatttcttgaaaacccatgctctttcctctgcagtctaaaccacactgtctctgcctccatcccactgtaaacctcagatgttatagcttatcaagaaggggatggggaaaatgtcatagcaagaaagcgaagtgactggactaccaacaaccttaataattattacatactagaggactttctttaatttctttctcatctatccattttattgtaagtagtaagcaaaggtgtaagtcttgagagaaatacatctcacacgtccattattcattcattaatgtatttaataaacgtgttaaattcatactgtatacaaggcactgtgttagccactgaggatgctgtgatgaagagaatgtattcagaccctgatctcatagatcttacggcccaggaaataatgcataaataaattcatgactatacacttgataattgtaatgaaggaaagtacagaatgctatgatattggctcactttttcacctgtaaaaatgggaataatactagtacttaccattagggttgcggcaatatctaaatgcgttattttacgtaaagcatttagaacacgcctggcacccagtagtatttagtgtttaactattatgatcattagttttatcactatttatcattatcatcattatcattagtctagtgttattattgttatcattctggggcctaaagtagattagaagataggaaagaactctataaataaatgactttaaactggagtcctgaacactgagtagctggggtagatcgaggggcggtggtcctgagagagtaaccaacacctcagagatgccacagccagagaactgggcactttgaacaacagtaagggacgcagccacagagactgagagatgccaggttaagcagaacatttgtaagtcatggtagacatgtagattttactgcaaattcagttgggagccattaaaagattttgagaaacagattgacgtgatctgatatgcattctatttattttattttattttattatttatttatttattttttgtttttgagacagagtcttgctctgttgtccaggctggagtgcagtggcacgatctcagctcaccacaacctccaccttgtgggttcaaccgattctcctgcctcagcctcccaagtagttgggactacaggtgtgcgccaccacgccaggctaatttttgtatttttagtagagatggggtttcactatgttagccaggctggtcttcaactcctaacctcgtgatctgcgtgcctcggcctcccaaagtgctgggattacaggcatgagccaccacgcccggccttatatgcattttaaatacacaacttctctttgagccccaagtctgggttagtgacatctcatacatgctcccagtacctgtattttctctgtaataatactcagctcctgccccttccatgtacctcctggttaagaagacaggctctgcagcaagactgcctgcacttagttctagttcaatacctttctttctctgtatgattgtagagaagtaattcaacatccctgggtcttgattttcttacatgtttaatggggataataatagaaccttctgcatagaattgttttaagagcaaaattaaaacacttagaacagtggctggcacacataaagcactaaataaatattagttgtttttaatatattgtaactgcctattttcttgactgtttatacactagactgtatgcttagttcctggcacaaggcaggtgttcaaaaatatttactgaaaaaagaatgaacaaggaaagagaggtagtgcaataaattgtaactaaaagaagagaaagattgctgtcctattcatgggaaaataggctttcttgaaactggggtatattctgataaggaggagcctgcttatggggccagagaaactgaatgactttgcagctgcccagctgctacagctttggggaacttgaaataacatccgtggaacaaaaatttgtttcagaatctgtgatgccaatctggactgccatctgcacaaaaagaaaactgggctcatgaaagagctttttcattctcttgggctatgtgactatctctctggaaagcaaatgcaaggctaaacctccggagttctccatttgctgcctttggaaggacagtctcaccaaaagagccagtcatcctactaagaacataacactatgacttccttttcatccctgcattgctaatagggcctcaaaggaacaagggctcagttctgtgaagtaaacacacacctttagtgtagtgaataaacactggaagaagcttttcacatatttgtaagctcggaagtcttttaggcattgagtagcagcagctcctttattgcttcatgcagctgcacggggtacctgcccggacaaacaatgaatccttcagctctctgaatgttccagttctgtgccgtgtgtgtgtgtgtatgtgtgtttgtgtgtgtgtgtggtgtgtgcatgcatacgtgcatgtgtgctggtttgttacttgtatatcccaggggaaaataagggttctttgcatgctttttgtcaacacaatgggtctctgttctcactgacctggttttcctttattccttccctctcatcacaagtttaggcagtctggctttcctcatccacagagcaaggccttcccctgatttacccctctctgcatgctcttcacacttccaaaccattttccatataggccccttaaatctaatttaaatacttccctctggaaagcctcaaatgatgagtcctgcctaattgctccctcctgtacatgtcctatgttgctttctaaaagcatcatagctctttatgtcatgggcataagttcttccttcattatttgtcaggtgtgtgtgcactccttaagctaaaattttatattatggcatctcactgagccaagaggaaggaggagtacttgtgtgaataagacctagactctgattgtgagtttaaaccgtttggaaataagaaataagatacattacttgaggccaggagttcaagaccagcctggccaacatagtgaaatcccgactctactaaaaatacaaaaaattagccagatgtggtggcacactcctgtaatcccagctgctcaggaggctgaggcaagagaatcgcttgaactcgggaagtggagattgcagtgagccaggattgcaccactgcactccagagcgagactctgtctcaaaaaaaaaaagtaagatacatcaagatagggactgtgtcagtcatggtcctctacagaaacagaatcagcagtaggacaatattcactttaagaatttggctcatgaaattatagtggttgacaagcttgaaatctatagagcagaaagtaaattcaggcagtaattaatgctgcagtcttcaggcacaatatgttcttttccaggaagccacagtttctgctcacaactgactgcacaaggcccaccaacatcatcgggggtaatctcctttactttaagtctattgattgtagatgttaaccacatctacaaaatacctttcacagccaacacctagatcaatattgattaaataacagggcactatagactagccaagtcagcacatacaactaattatcaaggacccatcaaccaacaaccccaaacacctgtctttggaattagactggaattatgcctagctcttctacaaacaagatgtataaaatccaggacaataaaaatttttgtattatttctgattgagtcttcacttcaaaacaaaataaaataatcattcatcctagctcacagaattgttttgaaaaccaaatgatagttcgaaagaccagaagcgcaagctattggtactttgaacaccttgacagtgcgcaagtagtggcagcacacctgttaaatattggtggccacacaaacacatcaccattctctctactgagcagacatgagagaagagaaaatcttgggcttttgctttacacgaatgccaatcaatttgtgcctagtatctggaacacacaactgattatcttaaactcaatggagggaaatatctttaaaagaagttaatttggaccagaaatatctcaggggaggtaggagtgaggttggagcattctttatgtacatttccacagagttgagtatgaaactttattccctgtaaaaacaaattggaaatttgaatgtgaatccaatttgccaggttatccttgagacgcccttccttctcacacctggatattaaaacttatctccatttccctgtgagtcttgtattcctgtcactaaaaattcctccagcctctttgcagagcacattggcaccaggcccccttctaaagccacaatgccgaagttctgattgcacctccgtattcctatgtttccggtaagtcttttaaagacatttggctcctgcctctggtcttgaatattttaggcctattgagtttagaatctagagaaaatagcagattaaatgtagctcaggaacaagagggtgttgtccagagaaagctgagagtgactggcacagcagacgtaaacatcgtcaccagggtgtacatagctttaactcaggtacctgcacgggcatcacaggcagcatggcacagatagttcacaggcctgggtatctatgcttatggactggccttccaagtgcagtttcctgctcactcttatttatcttctgataaagaattgctcccagcaaattactaaactaaacctactgctgatacttttactccagttgtaaaaacacattactccctctgcttctgcagaagtggaacatgcttctacaattcccttttctaaatttgttgatggattacttattgccccactcctcaagtttctgtggaggggattccatctaatctttaacagggaacagtttttgggaaatattaccttttctcccttctgtgctgcgagagcagagggcaaagacaagtaacagtgagtgggaattataggagaggtttttgcctcagtgagccttttaacccactagagatctggaagaaaatggagtgggtttctctgggaggtgatttgttctgcattcccttgctagaagatcacttgcctagacatatgtaggaagtttaacatgggttttcctcattcggaagaagggtggattcaatcacttctgagatttttcttgtgttaggagcatatatgatggaactgtgttttggtaaatcagtttcagttctacactgcccctaaagtattttgcttgttttcagaggtctgtccataaagcatttgtttcaaatacaaggcatgggggaggaggtgttatcacaatatcaaacccctgctaagtatcagattttctattaggtactctgcaaaggagatctgtttttatcctcaacaaccttctattaagtcaatatcattatcccattttttttaaccaataaaactatgcctccatgaatgtaactagtagtataaagacactcactcagcttgtaacagacagacctaggatcggaaccataaagacactcagctagtaagcagtagagttaggatgtgaacactgccttgtttggctcagaagcctgtgtacttggcatgagctctctgtgctgtccagtaagtaaaggtgcatgtgatgcccacacaggtacctgcgttgaaggtacgtacacccttgagatggtgtttacatctgtggttccaatcactctcagctgtctctgaacaataccaacttgttcttcagcaacatttaatctgtttttttttcctccagattctagaactagagagaatttagaagaaaatacatttcaagctttagttttccctcatgggaataactgagccaatagggaggtggcagtgtcttcctctcttctaggaataagtctccttccctgaaagacttttgggttttgagtaagccatcctggcagggaaaagaggcaggggagaatttttaggacgtaacagagctgtgggagacatatctccagtgcattactcactgcttaaaagacacccccagcctctgacatcacaaggagagagaattagatttcagatcagtagtgaaactgaggtgtgtcttgcttgaacacaaggaggcagccatccaactctaggctggctctggaaagtcccattttgaataatttgcttcttatgatgctttgttcagcttccctaccttaagtgaaactgtgtgacttaaatgaaagagcactgagctgaaactcaggaaacctaaatttcagtactggcaccaaccaggtgtgtaaccagaagtaaatcctttaacctttctagactcagtcatctttagtttaaattattttgagtctttgagtcttagaattcaatcttacttcagatttctataatggctcctggcccaaaaatagtggtgtgtgggtgttgacatggataattctttgtcacggaggaaacagcccctcagtaagaatctggaattcaagcctaggtctctttggtctaactccaaaacctaggcttcttccacctctcctaccctgacaagaggccatactattgtttcataacaaagtgtatctttattatttttataatccctgttagccttgtcattggcacagttcattagcaaacattcattgagtgcttatgagtgctgggaaaataaaaaggaaggggacatggtgcctgacctaagcttaaaagcattttcataaggagattctggagccacactgcctggatttagatcccagttctactatttttagactaatcatttcttaaactttctgcatacctcagttgcttcatcctcattttcttcatctttaaaattttcctcttagagttgttttaaggattaaatttgttgcttctgtaaaacatttaaaatagtgccaattatagaggaaagaccaaatacatcattgccgttattgttactattatatatatatgtgtatatatgtatatatatatgtatatatgtatgtcagtccccttgtgtcaggagtcttagaaggttgcaactgggtcttgtttgctggcacttaataaatgtttgttggatccaattattcaacacatatttacaatgtttctactatgcgcaaagccctctgatggatccttggtagaatccagaatttttacaactttttaaaaaattaccatgttttagagcttgcgtaagtataatttggaattttttttctctttcaatatttctcttctttctttttctgtggcccttgtatagaaagtattgaggaactgagaggaagatatctcacacatatgcttgctaacttaatcatatgagccatcctggaggaggtggggttaacaacacaccaaaaagaagattcttctctttcttaaatgataaatgtcttttagaactctgatgtcagacaagagagtactgcttacttttaatgggttttctgtgtcagagagagagaagggagagagagcgagagaaagagagagagagagattcattcaccactttctcattgactcattcattcaccctaaaagcacctggcgagtactcaccacaacatgaatcaggcattatgcctgggtaatgctggataatggagatacagaaatgaataaaacatggtttcttctttgggagagttaacagtcgtggggcagacaaacataacttgatttataacgcagtgtaataagaatttttcagaagcatgaataaagtgctctggaaggacacaggaaggcaggtagttgggagcaagatcctatcctaagtacaaataacactctgtactgagctgtacctaggaaatttataaattggattttattaaattttaaaaattagtatttcccatagctcggtcattcattatacgccaagtgttcagccatttcagctcaagttagcatattctttgagcacctattataaccaagtggattaggagactacatattaattctgaccatgactaggacaaggaaggtataagatatatgatttgaactctgccttaaagaatagatagtatttcataaggcaaagtgagaaatagtttttaagagggcagaccatgctcaaacaaatggaggccagccaggtgcagtggtgcatacctgtagttcgatctactcaggaggctgaggcaggaggattgcttgagcccaggagtttgaagctgtagtgcaccaagatcattgcagtgaataaccacttcactcctactgggcaacaaaacaagaccccatctcaaaaaaataaagtatgcagatgaaaaagtataggtttaattgcttagttattggaatgaaagtcaccctaggggattagtgaagaaaggatagggtgtagggatatgcaggacattagacaggaaagatggctgggcaaagaaaaaagggctttgcataccttccaagattttattttgtgtgcagcgaggagccactgatatttgttcatcagggaaatacattatcaaagcagtgcttcttgggatggttaatgtggttttggctacagtgacaggaagcagattcaggcttggaatcagaaaacataacagagattgatgaattgggattacttgtgtgatcttgagcaagttcataatcatttctgagctttagcctcctcatctatatagcaagcaagatgaaattacgacaagagcaacaatcacaacaacaatgtttattgatcattactctctgaatagcatggtggtagggcatttccttgtaatgtttaagcctcaaaacaactctgtgagttcttaaaaaggtaaacgtaaatttacccatatgacccaccaattccactcttagatatctacacaacacaaattgaagacgtatagtctttcaatatatgttccacaaagtcgaacacaaatgttattagcagcattatttatttgtttttaacttttgatttttaaaaatatatttagggggtacaagtgcaggcttcttacatgaatatattgcatagtgatgaagtctgtgggcctttattgtatccatcacccaaatagtgaacattgtacccattaagaaattttcaactctcacacccccttacccttccaccttttgtagtctccaacagccattatttcactctatatgtccatgtgtccactgtttaactcccacttataagtgaaaacatgcagtatttgattttctgtttctgagttaattcactgaggctagtggcctccagttccactcatgttgctgtgaaagataccatttcattatttttatggctgagtagtattccatggtatatatatcttagctgatcctgactcaagcagcagttgcccagacggattagaggagtgacaggaaccaagaaaagagctgtacaatgctgcaggcaggaagtaacaagagcttaccaaaggcactgtcaggaagaaagaaccaaaggtgttgacaatgaagccaaactagggtaaggctcctaattgtaccatattttaacttctctaaacaatcatttaggatgcttgattctatgaacaagagaagacaaagaatagaggacttcctttccttcagcaaacagctgacacactttcccatcataaacttcgtaattcaggatgtaaaaccagatccaacaaccaaacccagctagaaggttaaataaataagtgctaaataaataaacatgatttttcttttccttggcccatgagtctccatagaagatgccatgtgcttctggtaattgaagtctactagtcaattttcctttctttgtaaaattgggggaatggcctactcagggttataaactgaaactttgaggagttggaactttttgtatgttttgttttacattttctcgtcatgagccccatcattaatactaattatgaatcacaggtgagggagtgcacctaacatttcatcttttattttgaaatgctattaaaactcaaaaggcagaaacatagcctgtggccttggcagatgcaggactaggtgatttaatggggtttttcctgcattactttctatgactgatattttgtggtgcagatgtgactgccacattgtgaaacattattattaataaatccacattccccaaaacaaacaagacagcatggcaaacagtggtgtttgctctgtatacatttgggttggtttttcatcatttcctaggaccaaggccctgctgcttcccatcacattggtgaaaaatgtgagaattcacagtttgcctattttggcaacataaacatgggaaaacttgtggtcacagggtcaggactcttcgttctggagggcctggtagcaagtggatggggtcgtgagggagcttccttagggaggacaatattgaatctagaagttcacaagacttagcccatgtaataaagagaatattctgaataccctttaatattcagtctttcagtcactgtccccaaagagccaagaaaagctaatgtatgcccccccatggtaattaatgttcaagcttgaagaaacttgaagaaatcttaaacgtagcaacactaactgccaggtttgttagctgttataagaattcagccagtcacaacacattcaaaatgccattattagacactgactatgtgtgtagcagggttctaaattacagtcccagtcctcagagggattatagtgaatgcaggtggggataatatttaaatgtgacacatttacatattaactaacaattaaagtggatggtggttttcttctcagtgaagactttcagagctgtcctgcccccacaactggcgagtggagcctccatcttcgaatccaaacaattcgatctcactctattagagataatagaaaggtcatgagttttgacatcagaaactcacaagtcttaatcacacattgcctgtgtattaggtggattgtaaactccctgagggcaaagtctgtttaaacactgcgtatctcagaacccagcacagtgcccaacatttagtaggcactccacaaatatttgatgttgaacacataaaattagctgtaatcctagcaaagttaacttctgagtccagcgttcctcttggtgaaacaggaggaatcacacctgctttaaaggagctgagaggttgactagaacggagggtgaggaggaagactccagactttccttgcctgggcccaaattctggcctggcaatcattagctctgtgattttgagcaaataacttgtctttgcctctgtttcccacaccagcaaataaggacaataatatcgcctacgttttaggctaggcatagtggctcatggatttttggaggctgaggtgggaggatttcttgaggccaggagtttgagagcagcctgggcaacataacaagaccttatacctacaaaacaaaactttataaaagtagctgagcatggtggtgtgtacttgtaagtcctagctacttgggaggctgaggcaggaggatgacttgagtccaggagttggagatggcagtgagctatgattgtgccactgcactccagcctgggtgacagagtaagaccctgtctctaaaaaaacaaaacaaaaaactgtattagcccattattgcattgccgtaaagaaataccaaaggttaggtaatttataaagaaaagaggtttcgttgactcacagttctgtatgatggcctacaggaagcataataatgtcatctgcttggcttctggggatacctgaggaaacttaacagtcatggcagaaggtgaaggggaagcaggcatgacacacagccagagcaggggcaagagagagagggcaaggtgccacacttttaaatagccagatcttatgagaaatcactcactaccgcaaacacaccaccaagggaatggtgctaaaccattgatgagaaaaccaaccacatgattcagtcactttcaaccaggccccacctccaacactgaggattacattccaacctgagagttaggtgggacatccaaaccatatcacaaacctactttttcagtttgttatgaggattaaatgaatatttgtatagttcttagactagggcctggtacatagtgtgttctatgaaaatagttttaaaatgccttatatagcctgctacaaatgacgctgaataaatgttaaagaacgtgaagtttgacccccatttcctaaactagcgcctggcttactataaatacacagaatggaatataattattaattgggtgttacaggttttctgaagctcaagctagaaatatgggtttgtgggctagaaatatggggaagagcttcatcaaggacaaggaacaaaattgtaccttagtggaattaaatggcagtgataaggagttcacagagaaggcatataatctgcaaaagctggaggaaagaaggatcaggtcacagtcacaagatgctccaccatcagcaggacttggcaccagtttctgggagaataatttgtcatgatccagctttttaagtgagcttgaccaaagctctgctttagttctgtggtttcaactgcacagattaatactttgatggctgcttgtttattcatttatttattgaggaagtatttatgtagattctactatgtgccagacattttgctaggcagtggtgaataaaatagaaatggaagactgggcaacatatacctgggtctacaaaacaataaaaataaaaataaaatagccaggggcagtgacacatgcctgtgatctcagcctctcaggaggctgaggcaggaggatcccttgagcccagtagttagaggctacaatgagccatgatggtgtctctgctttccaacctgagtgacagagcaagacctgtctcaagaaagaaaaaaagaaaagaaatggacttcctctcttttggaccaggagggagagacagactataaacaggaaaataaatagattttgataagtgcttcaaaggatattaaaagggcacggtattgctcagatggaaaaatgggaaaaggtctgtccaaggaggtgatatttctatggaatctagaaagataagaaggaaaaaggagactattccaggatgggaaacataatattcaaaggtcttgagaaaggtatatttgagaaagaaggccggtgtggctggaacagagtgagctaggagtgagtggtgaaaaatggggttggtggcatatagacagggccaggtctcgcaggatcttgtaggtggtggtaagctatttggattatattaaagcaaattgggcagccactgaaaaaaatggagaagagaaaatgttatatatatatatatatatttttaaaaatgtaactcagatttcaatgtgtaataaattggattggaaagagaggatatgaggggaatgttgaagaagtctgagcaagaggtgatgcttgcctaatcaagaatggtagcaggaggaagtgagggaagtggaccgatgtgtaatatattctgtaggtgaaatagataagatgatgctgataaattagatggggagggactgaaagtagaaatagtaagggagagaaaagattcaagaatgaaatccaggcttctggcttgaaccactgagtgagtattaatgccaatgactaagttgaaaatgttaaaagagggaacattgaaaggtggattgaggaaaaactcaggagtttggttttagatgttaattttcagtgatctgatgtagccaagaagagatatcaacacagcagagaaaagattaggcagagagataagttttaagagttgcacagatctagaaggggtgaagggcagtgggacccagaaagcaggttgaggtgttggcctttgttaacagcagggacacctggtgaaagaagaagaagggaagatgtgggtgtaagtggaggtgataatcatcatcaccatagcttatatttattgatgtgtaccaggtaatgttctaagtaagtttcatttattaactcaatcctcttagtaaccttatgagtaggtttgtacgtacactgtatcaaaactgagagagtctcatctgatggtctacattgtggaaggggagtcaagagggacatttgaggagagaagctaggacacagttgggatagaaagtattcagtggaacttccaggcaagactgagagttcctctgagattttaaattatgaatataaagtgaatctaacccaaaatgcaaatggattttccacagcattcagcaatcagacttcagtggcctgacttaattggtgcttcatgtggaagcagggataatttccaatgccaggagtaataatcaagtacactattatcccttactagtatgctagcactttatgtactttcatgaagctgccttggggacttggccacaagaaaccttccacccaccaggctacccctcaatccctgctcagaagcagaaaccatggctccatgaaagaataatatctagagtgaactacaaccactcatcagaaggatgaagaaattgatggctgactttaagcctcaattctggaagaggtccaaactggatgctttgtcttctacctcacagctttccaggttcctctcagtgaccagggtacctcctctacctaagaaatcaccatcagctctccccactgccaagagctcataaatgaagaagggatgcaaaatctttacttgacacagaaagctttaggttgacaacaaatagcaatagctaacatttactgagcatgtcttttatatcaggctgtgggctaagtgcttttatatgtagtatttcccttcatctttaaaacaaaccagtgagataggaatccttatgatctcatactacagataagaaaagtgagctttagggaggttaaataatttttctcagaccaagaagctaacaagcagagcagccaagagtggaatccaggcagtctgactctagatactaggctcttttaacaagtacagtataatggcaaatcagccaacatctctgctggatcaagctgttgtatatatccatttgttgtcacatgttgtcacctttctatagatgttacttagaaaacaaatggattttatttccaactatatttagaccggtttctactctcccatgttctcaaaatgagacactaattgtgggggaattatggaattaatagattttattatttccctcttttgaaagcaaacatcctgttacagagtcaagtttatggtttgttggttttttgcaagcctggtgacctatgttaagagaatttcccctgaagtcaaatgtgctgacacatgtgacagcataagctgcactccatgggctccaaggactggcaataatgacctgtttttttttcccaccatgtaattatgaattgagatttgacttttaaaacaaattcccagataattgaggtcaatatgaaaattttagtttcaatatccgagtatcttaactgtgtagattatttgtgagtatactgataataagctccttatgttgtcctacttttaggtggttgtagcctgtgaattgtttttttcataaatgagggatatatggatttgcatggagccattcacgcattctgcacataattagagccaaatggtactcattaagattgaacatgagatgttaatttccattagcgcctggggaatctgcatttttaaataaagccccagatgattcttgtataaatcgaagtttaagaaacattgaatagatgtgctctaattgtttgatttattttctcttcttttcctattaaggataagaaaaattaaatgacctttaacaggcttgactatcactacaatagtaataatagccaatagttggtgaatgtttatctttgctgaatagtgttttatatatctatttcatatgtaacacattcttaggcagagattatcattagccccattttgaagataaaaaacaatgagatggagagagtctaagcaacccaagatctcatagctactgagtggcaaagcgagggtttagaattatacttttgcctttgaaggccaagtcattatctggagacagataacaatggatataaatcacagctttgctacttaccagcttgaaagatgagtttaataatactgactttgcatggttattgtaaaaatgacagaataatgcatataaagcaccaagtatatgcctgccaagtagtagatactcattaaatggtggctattaaatgtcagctggaaagttgaacaggtattccatgattttgatcactgtaatcagtgaacacacgtaatccaaatacctgcctacatatcgtacactgttcttattgttttaactctccaaattatttacataattatctctacctcctccttcccactatctctttagatatgatctgtgcctaagactccctaagacactaattctacatgatttgaaaagtaacataaatacttctattgtttttctatcctaaggaagtttgaatgaatttaagatattttccaatgactttagtacgaatgtttgcaaagggccagagctccctggaagtaagttgaaaaacaaacccagctgtaatagcctggtgacccagcagcccagacctgccattataacccatttggggattgcatggtaattgggtccatggcatttggcttagtggttctgattgtgacacatgatgattcaagtttattcatggacacactaaagcatcacaaaatgaccttttttgaggtccttgaggtcaggcggggagggagggagaagcactggggcactctaaacaaagcagctttgtttttacaccgcttgcttggacaagtgtctcctcacgtgcagcagtcatttgctgtggagctcttggcagagtaactaaaatgtgacagaaatgaagggcaaattctgaaatcccctggaaaatcaccctcccaagcaaatatttgccgtggtattgtagctcgatgacttattttttgtcattcactttttttggctcattcctttcctttatggccatttaaaaggtgggtaaactgaatatttattgagcatctactatgtgcattgcatgtaccgtactgagtttatggaagatagagtctgagctgaaatcatttaccatctctagaattcatcctccgtgtctgcaaaatggggatttgggcttcatcagtgattcccaagttagtttatagtttattaaaccatattcagcaagtgattcccaagttagttacatagtttattaaagcatattcaacattgcatcttctatttaaaacacacacacaaaatcttcagaaaaatctttagaaaccaagaaaataaactttaacaaaatcttctcagccaatagacatacaaaaagcatagaatctcaacaaaagggccacctgaatctgcataaaggctaggtatgtgattttgttgttgttgttctcaaccatataaaactggttgagaactccagatcagataatctctaagatttatctcaggttcaaaaagctctgtggccggacatggtggctcatgcctgtaatcccagcactttgggaggccaagctgggcaagtcccctgaaatcaggagttcctgaccagcctggccaacatggtgaaacctcatctctactaaaaatacaaaaattagccaggtgtggtggcaggtgcctgtaatcccagctactcaggaggctgaggcaggagaatcacttgaacccaggaggcggtggttgcagtgagccaagattgcaccattgcactccaccctgggtgacacagcaatactccgtctcaattaaaattaaaaaaaaaaatctgtgattttatttgggcttctctcaacaaagttggtgtttttgtagctcagagaagatatatctagcattagagaaggataaatcattatggcttaagagataatcagtcatttctaatatcaacttctgattgtttattcatggacatatgtatgtgctgacccacaaaacacaattttctaattgattctactgatattggccatcaaatctaattaatttagacccaaagtgaatttttttggttttctaaagtcagtcttcactatcttcgtagcccaaattagccaaataatttaggtaagaagtatttattctaccatttctatcaggtttctctctgatgcctgtgctttgcaaacaggtcagtaaaagagataaaagaaataagcaataaatcttaagtttttttcttgtctatctgtattttatctgtatttttttgttatattagctattttttttattaattcagtatgttccagcaaaagaggagaaaaaaacacacagtaaagggaaaatcaaagaggagagacacggttaagagactgactacattaaaagagaaaggggaggaatgaaatccaaaaagaattttcagggaaaatctctcagtaaaagaaaaaaagagaaagatattgcataggatgtgtttcatgactcatgcctggctctgtacctgagtgattcatttggtggaaaacatagctggctcagagaacctttcacaggccccagactttgttgaaatcatttgaagcttcattttgtgtgtatattttcctcacttctttaaaactgaaatattaattgcttatgagaaataggccctgatcattggagtttatgtgtatggccacttgagatttagaagtagatcagggacttcgaagtaggggaagtgtttaagaacctgggacaggtttgttcctagtggcttttctttatctcccagcaggaataaatagtaggtccaagggaatcctgttggatagagttcaaaggggacaggcccttggtaggggcagactagattagtggctttcaaacttttttgatcatgactcacaataaaacatatattttacattaagactcagccccacatgtctgtgtgttttgtgaaataatacttacctttactatatatgctttacttgatattttctattctattatattttattccattctattctttttgttttgttttgttttttgttttctgacggagtctcactctgtcatgagtgcagtagtgcaatctcggctcacttcaacatccactgcccaggttcaaacaattctcctggctcagcctctcatgtagctacaactacaggtgcataccaccatgcctggctaatttttgtattttcagtagagacagggtttcaccatgttggccaggctggtcttgaactcttgacctgaagtgatcctcccatttcaaagtgctgggattacaggagtgagccgctgtgcccggctcccattcttttcttttgttgttttaaataaatgctggcaaagacctattaaaaatatttcacagctcagtagtagatttctatgtacaactttccagtttctgtcctctctgcagcaccctctaaacacacacattgttaaaatacagcacaatatagccaattttcaggaacatctctctggcactccatccttcacactaaaatacttgcaacttctcgaacaccatactgtctttcacttccttcacgtgtcgccctctctgctcagtgcacttgagtactttcccactccaattcccctttgttcatcaggctaatgcccgctggtttagacccaattcagaggtcaacgtctcttattagggctgtttgttttctgcactctcctgagcatccggggcttatctttatctcagccttatcatgctgtgttatgatgacccatttatatgtttttctttcccactagacttattggtggcaaaaactatgtcttatttgatatccacaggacctggcctaatgcttggcacatacctgattaataaattctggatgaatgagacctacatactggtaggcacgtgatagggagtgggctgacttcttggtaaactgtagtctgtttacgataaacaagaaagcatacttttatggagaatgctcagcttcttttagttgatgtgctgaccctcattgcaattctttttctgttgccaataggagataatgtagcaaagtagctatgaagtcagactgaggagctgcacagaactggatttgacttctggctcatcagttactagctttgtgaccttaggcatgttacttaattcttttaaatctcaggttcctcatttgcaaaataggaataataaccttctgtggctgtggttaggattgtgtgagtgttattaaataatggcatatgagctccatgaggtcaggatttttgtcacttcagttcattgtcatgaacttagaagagaggctggcgcatatttgttgaatcaatgaatattttgtacataatagaccatcaataattcatagcagctcttattcatgtgaatttttcaccaactcttacacgaaattttttggagtatgtatgatgtgcataataattctgtatcccttctttagtcagaagttagggacccacctgtgaggtgacccttccagagcctcaaattcagtgacacaagatgcatgtagaaacagttgcctttcgaaagaagttgttttcaggctagaaattaagtttaatcattccaaggctgtttgattctgtggaagttctacagttctgtttttgagtcatcgcccatcggcatttgactcttcgtgtctcttttcatacatctcttagccatatcaccatttgctgaatattagactcacacagattcagattcagagtctcgggggaaaatgattgcatttctaagtgttcttggaactgtttcacttgcttcctcgacagatatcttgtgtaaggtccataaggatagaaaatccattattacctaagaccctttactgtttcccatttcatgaatagatgtttgtatttcaggttttcacttgggtctttcccatgttcagtacttttataagtaacttattgtgctacaacgaaggtattgttttaggcttttttgaatttcatcagcatgcagacatccctacgtactatatttctacaaaaaacccacaaactttaaaaagtaattcccaaactcttaaagaagccaggccaaataaaaggatggcattgctttatttctatggcatattgaaacagtaagaatgaaaagagatcctcaagagagcggttttaccttgcttttactttctcatgcatttatccaaaaagtcctttttattatattattcattatatattattcattgcagctcactcctcagataattaacccacttctatgataataatgttactccattcataaggactctgccccttaaaggtgctacctctcaacactattgattggggattaagtttccaacacatgtgctttgggggacacattcaaagcaccagagggcctggtctaatgattaggagtaatcattagaatggtgtaattcatcatggtgtaggtagtaaagttaaatgatccaatttattagtccattattcattcattagtccattatggttgcttaccttacatatgactaggttggtgaacaaggttgtcctattacttatcctattatatgtaaaagtctgcccaaagctgttttaatcatttgtatgaatgtaggtaccatttcaaagtgcactccttatcataaactcttgagatacatactaagatgatataaaagagagtggcaaatcctatagcactgtgctaatttaataacttacaaagttcatcaatagaacaatatacttttgttctcatgctgactcttgttctcaagttgaagattactccaaagtcactatagtcatattatgctgtctggggctcttcattgaaattttgaaaataggaggaggagcatatccagtggtgaaagagaaaacattttggtaagtggaaatgggagaaaaggaagcttgcctgactacctaataggccttacttagttgcttcagtgatggggacctagtagaccacagaagggccaagctgtctggaaaagagaagggttgtcatttctggaacccctactatgtgccagatacttcatgggtcttttacatctttaagttgaacctatgggggattttattgcattcgttttaaagataagttaactgctgtccatttaaaaaagtaagtacagttgctttgcaagatcacacaacttttatggggcagggcctgggcttgagtccaagacttcaaagcttgtgttctttccactagccacctactctcagaatgctcctgttaaacccattatgtggcaagtcaggtatgtgttgcacttgacatcttttttagttttccacttgtacaaacattccctgaaaaattgtggagaggttccatacagtggaacttgagatttcatctactcagccttctaccctgaaaggttcctctgagctcatcactgtaacctgaaatgtctttcacatggatctgaaaacatttagtgaagtagaaagtactgtgctcatagtagtcattctgtggtacctttttttcctttttaaaaaaaggaaaaagtttagttgacaccaaatagttgtatatatttgtgggatacagagtgatatttttatatatgtatacactgcataatgatcaaatcagagtaattagcatattcatcaccttaaacatttatcatttctttgtgttgggaacattcaaaatcctctcttctagctttgaacgtatacaataaattgttattaactatatttaccccatagtgcaatagaaaactacaacttattcttcctatctagctctaattttgtattccttacccaaactctctgtcttcctcttcccactaatcttcctagcttctaataaccataattctactctctattatgagctcaatgttttttagcctccagatattagtgaaacttgcagtatttgtctttctgtacctgacttattttacttaatgtcctccaagctcatccatgttgctgcaaatgacagaatttcattccttttcatgagtgaatagcattccattattatatgccatatttcctttatccattcatttgctgatggacatttaggctaattccatatcttggctattgtcaatagtgctgcaataaacgtggggtgcagatatctctccaatacattgatttattttcccttggataaatacccagtagtgggatcactgtaatatggtaattctatttaagctttgttgcaaaacctccataccgttttccataatagctgtgctaacttactttcccatcaacagtttataagagtttgctttcctccacatccttgctggcttttgttattttttatctttctgataatggccaaaagcttttagcttttcctcactcattgtgacattagctgtgtgtttgcctgttttgtgttgaggtttgtaccttctatgcctaatgtgttgagagtttttatcattaagggaaattgaattttatcaaatgcttttttctgcctttatttgtaggactttttagtaacaaatttcattatagaatgtaaatattataaggaaaaaatatatgttataatatgaattaataatggcatgaatattaaaaccaaacaaaatgcatattggaaaaattggcactattgcacaaacacagacatctaggggaatgtctttctctctggtgttcgtgtttttaccttcttcagccatgtgaaaagactttcaaaggttctattttattctcagagttgacagactcacccttcaacagagtgggcatcaaaagccaatagctgccttgagtaaattaatttttgttgattttagttcccctttaagacttcctgagatactgatcatggaaatgaatattagcgatttaattctggcacctcgtcaggactcacactgcattcctgggtgcagcctggaacatcactgctggctggactcacttctccttgcccaccaagggacctgaaaaccacattaaggtggagaggagagtgtggcacctccttgctcagagatcggccagttcactgtactttattgactgtggactgttgatttatccagccttctcatttcacatgtgagggagggcgatttggagtgacttctgtgcacttacatagctgataatagaggatggaccagaatccacatctccaactaccagtccagaattctttccattccccagtcactcacttattcatacattcatctaacatttattggatgcctacagtgtgtgtatagctgtgactacaaagatgaattggacgcagaccctgaactcaagatctttaccctggcttgtgtttttgatttcccagagggtctgaggtccattaggaaggtgactatctgccagggcagtctctccatgccggctggattaggcaatcactgctggccgtatgcagtcccgttttcagtgtccaagtctattcttcatagatggcctattctctgtttttctgactttcttactggggtttctcacccaaacatagcattactgataaataatatttaagtggctgagctctgaagattaagctattaatatcacaaacaggctccatattctctctagtaaagagcgaaaaagagtcagtatgtatgtgtgtgtgtgtttacacatatgagcatgcggtgtggctctctgagacacttagaagaaaagttcctgcgtgctcatgaaaggcccatagtacagctatgagtatattccaggcctcacatggctgcagtattcaccagattaccaatattagagaagcagatttttttctatgggtaatttttaataatttaagggctctcatttctcattatttcagaaatccaacttggagcttctcatttgatcagcaagtattttccaagggcctcctgtattctcagccctgtaagaggtttgggccttggaggctgagtcagagatcatgatattcaaaccgttttcactttcattttgttgttgtcattttctctccatttgatcctgaggtaaaaaaggactagtaatattatctctatgtcacagaggaggaaccagaggcacagagaggcttaatgacttgccaggaccctcaaggctataagcaggaaagcaggggcgagaccaccaggcttcttaccgctaggacaatgcttttttttttttctaactatgccagattgccagtccatattttttttaattcaggaaggattagagaaaaaatattgcaagcatataaatgtaatctcatgatagaatagtaacaattacataaaaatactaaagttcattttaaatactacctaaactaggtcatgaattcatcctatagctttttctcccagcaggcataattgagttgctttcccaaatgccaggttattctacccatgcgagttataaagacctttttcttgaagggattactgctgaacttctcctaagtcatgactttgtgatgggagagatataagtaacatgttcgttgggcttttataactctagagaaagctcttcctaaatcttggagcttactgctcagccaacttattgactttgtttaggaggtggccattagcctctcaaaccacagaggtttggactgttcaactacagtaagcccagaagcaaagagagattagaacacagcatcactgggtgaaaatggggaaagctaaactgcttcgaaattgcagtgctctgtcctatactcatttctggaggaatcaagaagagcctgaagcagaagtgacccactggccttggagacaggaggcaatggaaaagcacagttcatccacaaaccagcctctctgagcatcagcttcctagctgcgtgacattcccaagactcttccctgcactaatttccacatttataaaaaagaaccacagatgtgtccttgatggtcatcttactgtcatctgttaccaccacatacgctgtcttgttatgtggcttgggaaaatctataaactggtcttttggctttgatcacctgattgatttactgtcagcagatgatattaaaattagctttcatttgttgagcaaatctggatgggcaattgaggtggaaacagggagtggcctgggtggtggctggaattagaatagtaatctcttgtgttttagaggttacaaagcactttcccacatgtagtctcattgaattactacaaagtcctgcaagggctggtattcttaacctcatcagacaaatgagaaattgatgttccgaaagataaagtgactggtcagcattcacaaaaagatttggtggcagtacaaaaagtggaataaaagcaaaagctcttgcttgctttctggtgcaacacatcagagattgattagaatctactataaggctttttggctatgctgagatgatcgacaattaattataaaacactgtcaacatagacactggtgctcttctctttctgggctttcatacctgctcttcttgaggtttccctccccaacctctatctgtgtgtaactccttcagtttatcacttggaaaccacttcctctaagaagacccaagaccttgctagatgcccatcctatgggtttccatggcatccaaatattacccacactctgttcataccactctaattcaattgcctgtgttggaatatagctccatttaggcactaagaatacttattcacgagtcattcatgagtggttattttttcaccattgtaaccacaacaccttgaacagtagaccctggataaacatttcttgagaaaatgttgcctgatctgctgtagccaagaggaagttttgcttccacattgccctcagggctgggagggaattagaatctcttcccctaccctcctgctttattaaggtataatggacaaataaaaattatatatatttatggtgtatagcatgatgtttatatatatatgtgtgtgtgtgtatatatatatatatatacacacacacagtgaaatgattaaatcaagcttgttaatataatctgtcacctcatagactttttgtttatggtaagaacatttaagatctactctctcagcaattttcaagcatacaataccttattgttagctaaagtcaccgtgctgtgcaatagatttccatagcttattcctcctaacagaaactttgtaccctttgaccaatctttaaagccatccaagacagtaccatttccagaaggaggctcttaggaatccaaagaaaccaaactctagctatttgcataaaatgttagatcattcccagaagtaagccttagagttgagagagtactagaagtgtgacaaggatggaggttagcatttgtgtatccttatgggaaaacaggtaagagcggatatttttggagttactgggaaacttaaccatgacacttggcctgcttatgtgtctggtattattgctgggaaccaagcttcatgccaaacctctagctatcagatgtcagttttgggaagagacttgaacttgcttatgtggttatttataacagtagttttctattttgtgtcaggttagaagacaccatcacaccactgaaatatgttatcagaaccacatgcagatagaatatcgtaaatatggtagatgatgagcaagacctaggactcacaattcaggaagatacagaacccagcatttaacctagtacctacatgtacaaaatcctttcaggtatttaggagttaataagcatattaatataatcatcctacaaaatgaatttgtccaatcttgtcagtgaggtcatttctgcaaaattttaaagggcttgtagagtttgacaagagataaacattacaggcattgtgctgaattttcagcaaaagcagtcataggcaatataaaacaaaagagcacgactgggttctaataaaactttatttacaaaactaagaagtggaccaccatgtttgctacatcacggttttctgaccctggtaaaaatacacctatcaattcccatttttactctttcatttccttctggaaatctttcctatgttctccatcatccataagctaaagcctaaactccttaactctgctctgatctgaacagtccctcatatttagtggtccttttcctctctttgtgctcaagtcacatttttccatgcggataatgccattctcaatgctttctacttagtccaattctacccatcctttaaggtagatgtcttcaaatgacatagaggggtcatatcagaatcatctgggaagccttttgacaataaacacagtgctcctctcccacactaaattctcgtagacccagtgaggagaatggggaaagcagggacatacagggttggaaaatgtccctcgccttattcaagaaattctcaccttcttttaaaactactgctataggacattactaaaatccacttcctccaagaagctctccctgatcacataaacccatactcagcttttctttctgtggacctcctcagtcctcaatgctcacaaaattcattttaacacctagagtattatttggctatttaagcttttcctgtgccaggcactgttataggtactggtgtacagcagtgaacatgacagtgaatgcccttctctcagaagatgacactctaatgacttgaagagacagacaagtccatgtgcccaaaagagtgaaaagataatttcagacaatggaaacaagataatgggataaggagtgactggaaagcaaagcgtaagggatggttggagggataaggaagtgctgttttagataaagaggccaggaaaagcttaagaagtctgtaattgagcttaaaatcaaaatgcaaaaacccagaggaaaagaactgcaggcagagggaatagcacagttttatctttcccttctgtgaaaatcctattgaatatagaatgttggagaagcaagactcatagagatatgaaaaatagtcttcttatttagggttgttagataaaatatgggatgcctagttaaatttgaatttcagataaacaacaggtaatttttttagtagaaagactgattgtagtataataactgaaaaaaagtattatctgaaatttaaatttaactgggtgtctggtttgtttgtttgttttgggttaaacctgacaagcctacattttattcataggaaaaaggtggaccagggtgatttgtgtctaatatcctccagctcctttaaagctgtactgagacaaaatccgaatctaagcagaagcaatttaatttggtgttgctatttcagaagatcttatattgttttctgactgtctcattggatagtaatttgtcttcctggtaactccttaataacagattccctatgactttttaaaaatcatatactaagttcaatattaagtaattaatttattcttttatccttcatctatcacaagccagtaataatagtactttcctgaataaaaggtgacaggcctccattctcaagtatagtaggagaaattagcagacataactcatttaaaatcagcttggatcatgacaaagggccgcagcagaggcacccaatagactgcgtttctgagtagggagatccagcatgggaatcaaggaagcctgatgtaggccttgatcaatggcaagaatttcaataagggattatagaagacatcatccaggaaaaatagatcaaagacaatgtgctgaaaataacagaacttgtattggtaataagtccgtctctgtggttgaaacagagaatagctaaatgataagagcatgagatgttagacctgggttttcacaaaccctgtacaccaaattaagggattttatttgttgtctttatttgatacctttgaaaacttgtggacgtctaaatatttttgagctggcacttgatgtaaaaagggtcacaaatgaagaaaagcaatctgatgcggtgtaaaaacatggagaccagtaagagagtgactgcagaagtcctagttattcaaatgaagactcaactctaatttataataagacaaaaggaaagagggcactgaatgcaatagatatttttgagatagaaactccggagcctgccaactggtgggttgtagaagttgagagaaatggaggaattgaagataaagctgagattttaaatcaacgtgactgggagaaagacggtgccattcacaaaagtatggaaaacctagggagattggtagattgtaggtggagaagacttaatcatttttaaatattgcattatagaatgtatagctataaagagcatcatgataatgcccaatccctttgtttcatgtagaagaaaatccagtgggagtaagtaacttgcctgtgatcactcagtaagttagtgaaatagccagttctggaaatctgatgccctattttccctaaacagtgtttcattcataagatgggctgtcttatgatgagtttatagaagtagaataattgtgtggtgctgtgcagtgatcagttggaaatacagatgtggcacttttgtaaaagatcggggacaatgatttgggaggcatctaaatgaaaataacatttgaaggtgcgaaaacaaatgtggtagccgaaatagacgtagtgcatttaagtcaaatgtgacagatgacaatggggactaagaagaagtctccactgaatttcacatttagaaggccattgggatgagagagaaagagagggagagagagacagagacagagacagtgcagagtgaggagctggtgcagaagtggaaacaaaatttaaaattatttttctggaagctgacagtaaaatgagaaagatagaatatcattgaagcagggcctaaagaaaagctttcaggttgttgttggataggagaaaaataaatgcacatgtaggtagaagcaatgaaagccatggagagcaagagggtaaagatgtaaatgagtgaggatagtactgaaattggtgaggtcctgcaagaaactagaggagacagaggagcaggaaccaggaggacactgaagcagatggttaaaagcggagatagagaagcctccacagcacaaagtggtgaagtggatggaattcaaattgacctttatctcatcagtgaggtagaaagttgtgttcttggttaaaagttagaggatagaagtgggaatgggaatttgtgaatagtggaaatgtcttgacataatgactgtggagaatcagtagagagatgtaaacccagattgagggccttgctgagggtaaagtagtgcatttgtggtagacctaatcaatctagtttctatgctgttcaactatggaagcagaagagaaaatatgaacaatgggagatttccaggaattttcaggtggtggtgagtaccggtttttttgttgttgctgttgttattgttgtttttaaattactgttgatggaattaatgttaggtaaagagtcaagcagactgggcaaatgtctgcttgccatttgctgaatgaaggagttaagtcgagggccaaggtcaggttctcaagggtgcttttgtgccaggctttagctgcatgttgcacacattatttttttatccttgtgataataggaaaaattagataaatcataaacttatgaggtaaccattactaccccaaatttacagatagagatcctgaaactaagattgagtgaactgtgtacaaaaagacccacaggagtaaatggcagaactttttcaaaccctgccttgccgttgcctccagtagccaggaaggaaatgcaaaattgggcagataaggtagctgaggtcagatgaggaatttcagaaatagagatggaacacttcctaatgataagctccaaagtgaagcagtggtgacagaggaagaatcaaaatgctggttatagatgtcaaggtgcaaggaattagagagttcatggatttttttccggaaacttattattgaagtatcatatgcagagagaaaagtgcacaaatcacaaatgtagaaatcagtgatttttaataaaatgaacatacctatgtaaccactacccagaccaaaagaacagataactgccaattccatagaaggcccctggaagtccctcctagtcactaaaccccaaaggtaattaccatcttgacatcttggcttaatatcaaagattagtgtttgtctctttggagctttgtattaatggaatcatactatttaatgtactttttaatatctgggcattttttgctccacatttgtacttatgagattcattcctgttgtttcatgctacagttgttccagtagatttaaccactaatataaccatgcaaatagttgccaccttttctaatgagaaaagagtcccattatgtgaggcccataaacaaaagattatgtatatttttatgcatttttattggatagaaagtgtgggcaacttgacagatacatttctgacatatacagagctatgctaacattgcatttagatatagttactaaaaaattataagaaagttctgcatgttctactctatagtactacaaacagccttgtaattagaaaaaagaaggttcaaaatttagtgcaatttacacatacattgtcgattcaggaaagaggctaggattcaatgaatgcactgacattttgaaacaaacaaacaaaaaatcctgtgtctttatgagtgtttggaacttcaggattcaccaaactattcttggttgtttggaaatgatgtacacttagtcctggaagaagatttaaggaaacaccacctgcctttcagtagtatgtttctgggaaggctctatgttaaccattctgcaatacaaatataaataactagatacactttaagacacaagacgtaatggtctaaaaaatgatgttccagagcagttggaaatgcagacaagtacatgattaatattgcaaatgggtttataaaatctccaagttgctcaacctcccttgagactcagtttcttcttctataaaatagagataatgctccatctagctccctgggcttctatgtgaatcagatgacgtggtatataagacagtactttccaaattgtaagacaagaatatggtatgattcttacttgcggtaaatccttttcagttgctcattgcaggtcaatgtgaagggggaatacccagatacgtagcaccacagattgcagcaaagtttagccaggtgatgaataagtttgcctttggaatcagacagtcttggatgggagtacaggctgtgccactcactagcggctgtgtaactggaggcaagttattaatctcctagagccataaatttcatttctagaatggagatcatagcatttgttagacttacctagaggaataggtaattgtaagaaatgcacccctcatggcaccttgtgctcagaattataccaataaatagtgtcggttaccataattctattatgataatagcaataataatagtatgatggcttcaagcagccacttagtgctgttgatgtacaaggcaaacattgacgtcctggggtagtacctgccaggctctcccactgttttgttacttcattatttaagggaatttttccaggctgatgatagcaggcttggaaccttggtagcttacatcctgtggcctctgggcacctacaaaattcaggtgtcaagggagcctcatgtgggagggcctctgatagaggaactactctcctcttctctgctcccagattctcaggtaagccctgtgcctttctgtaatttcttgatgagttttagaataatggaacatatgagcagaaagagacctctagacatcatttggtacaacacccacatttcatagcagaagaactagggctcatagaggctaaggggctttcttttagagtgagctggtgataaagccgggactataactcaaatctcccaatacccagttcagaacactttcttctcttccccgctgccctcaggaggtggcttcacctccactctctcaatgcaaatggaggattgttatctgctttagatttgggcttgaatcttattctccatggaatcccttggacaatgctttgcacataatagttactcagaaaaaaagtatctttaagtggaattcaatttctaggataccctcttctcatattcaatttttagagcagaaaccaaccttaaatatcatctttaaatgaccaagttcatttctctgtgctgcacatgtcctacttcctaggaacattctcctctagttgtcctgggcagtcaagccatctttccattgctcttccactgcccccactgtacagctacgtgctaatgcttatgtcaagatagcacaatatagtggctaagagtataagacctggagtcaagagagaatgaggttcctggctgacacttactagatctttaatgactctaaacctgttttcttatctgtaaaatggggaaggtaatgcctactttgtaaggtgttaaacactaatagtatgtaaaatctttagtatagtgcctagcccatattgagtgctcgataaatgtattaatattagattgcatcacaatgtatacattgatatgtctgtctcccctgttgaactgttatctttgggtacagaaccttgccttagttaattttgtatccatgggatcttgaacggtgttgtctggtgcagaataaatagtcaagatttttaggagagggagaaagagaaggaagggaagaagggaggaccagttatgcggtgcagctgagcgccaacctaaaaaattaaagacctgggttcaagcttcagcttttccatctactggctgtggagttctaggcagttactcaatgtctgtgaaacacattctctttatcagcgaaacaggtttgctaatactgacatcatagcattgctatgaggataatttgagacaatgtgagactgtttgcatattgaaatgtactttacagatttatacaaatcatcattgctatgagaagacatgccttcactgtctcccttattttaccagataatcagccactttgcagtgactccatctatggagcagaaagcaccccgttaggtgctgtgaggaggcctttgctttcaatatgtttactatgcagaagggaggttagaatccacaacctccactcacagccatggcaggtagcttgagagaacttctggctgggagcctttgacctccactgacctacctctccgagtgcccagcagcagcagtctctgaagtgacccctaatacggcatgcacatgccaggcctgctcaagttcatctttggaatgctgtgtcctttgtcaaatgtcaccagcatcattttctcatttccctcatgacacacattttaaagcagcaaagtgtattccccatgatgtaaatggtacagtggcagagagtggagacagagggtgccctaatgccagtggaagagaaagtcagggctgattcctgaccgccacttccccgctctgagcaccgcatatagggatctgctctgagacctttatctttaccttcatacagagcttctccttccttacgtataaatccccaaatgtataggtctgggaacctctagagaaacacggatatagagaaattcacctcagtgcctcttattcttcatcagggatctataaagctttttcaatagtaaaagcagctccttttaaacactccctgaaagcattacctgatttcctcacatctaaatccacatttctttaacctactcttttcatctaaatgagagctttaggtggatgttgagcctccattcttaattctggaggcttgggtttctccagaatgtttagaaggtttggctcacatgggtgttggtattagtttcctattactgcaataaatattacacaaacttagtggcttaaaacgacacaaaccaaggttttggcaaggctgcgtttctttctagagactctaagggaacatccattttcctgtctcttccagcttctagaggttgcatgcattccttggctcctggccccctttcattttcaaagggagcaatagctggtcagacctttctcaccttccgtcactgtgacactaaatcttctgcttccctcttcagcattaagaacactttcaattacattgggccccactggataagccagaataatctccttattttcatgttacctcactagcaaacttaactccatctgctaccttttgccatagaacagcacatgtttacaggttgcagggattaggatgcagacatctttaggagagtgatttcaggatctcaaaatttctctatagcaggatcaacaaactacagcccatgggccagccacatgtttttgcaaataaagtgttactggaacacagccatttgtttatttatgatctgtgatgaccttcgtgctaaaatggcagaattgtttgcaacagagaccatatggcccacaaatctaaaatatttattgtctggctcttttgaaaaagtttacctctgctctgtagcactttctgtgtctttggttctgactgtgactctttagaacatcactcacaaccttgtggatatctgcttcatgttttaattacaaccccaaccccactttttaaattctagcagtgttctgcctgcctctccagcagttcctcctctatcatcaattaccataaaattatttatcccttgtagtaactccaagcaccatagagtgttaagtctctttactttttccctctgcttaaaatgcacttaccttctttctctatctcttgccaggcaagctcctatttatcctttaaaaccgtgccaatgcataacttccaggaagccttctctaacatgcccatccaaggagaagtactctactctgaaattacttctagaattctagaatagaattacttctactctcaaaacagtcttgctggactgtaagtgcctcagtggcagtgactgagtgatttacccttcttgttgcccctgaaccttgctggagaaactggttctttctatttcgtggagggaatggctcttttcttgaagattcacttcccttctcctggcctcagtctcatcatgtgtgaaccaaagagttggattaaatacagtcagtctctaaggtcccttccagattcaataatcctttccatcccagaagatttggcctggttccttacagatgctgaggagaaatctcctgcattaagcttgcaccctgcagagttggaaatcatccaaaacatttatcactcatagctttgctttgactgtgtggcaactgggaactgaggaaatgggggtagagtgactggaagagaacaaggagttgctgagataatttgggggagatctcttgtaagtatttggccctgacctttcttcaggaaccaatgagaaggcagcacagtggcctggagagttgtaatccttcgcagcaatccatgcctggggctcctccacttgttatggatgcaccctaaatccttgcaaccacgtgggagtcaagacaaactcaatgtggtccaaattcacatgtctccccctcctcccctaactccctcacatgtatcagtgagggagtttctgctcttgtgtcccactctaaggctttgtgacaattttggacacaattgtcaccctttgtgatgattttggaaactcgtctctccagtcctccatatcccatcccttaaacatatactttttccttccaaacattgcttagaacttagctcttctctgttatcctattgctaccatctattctagcctacacaggtaatcctgacagtagaatcttccccaggttcccaactctagctacttcccattgagagccatcttacatcctcctgccagcttcatagttgcacattccctctcccctcatgcctcacccctattcaagaacctacaatagctccatgcattcctgcatcaaatccaaacttcttggtctcatttcgtaatctggctccactgttttttgtttttgttttgttttgttttgtttttttggagatggaatctcactcttttgcccagcctggagtacagtggcgtgatctcggctcactgcaacctctgtctcccaggttcaagcaattctcctacctcagtctactgagtagccgggattacaggaacccaccactatgcctggctaatttttgtatttttagtagagatggggtttcaccatattagccaggctggtttcgaactcctgatctcaggtgatctttccctctcagccttccaaagtgctgggattgtaggcttgagccaccgtgcccaacctccactgtgttttcatcactctattcagtgaaacctatcttgtctctgcttcacatttcattttggccgccatgccattccgcgtatggttaccgttgcctggcttgtaattcagcttaattcagtgcattttcacaaacacttatgaagtacctgctctgtccaaagcacaagcacacctttgctgctcccagtccttctctgatgatccaactgcagtccatggtttgcccttgctgttttcactttgtgtctatgcactcctcccctcctggagcacattccttgaggacaatgacaactgtgtctttcactctcgtacttactgggacctactgttaagtccaggctcccagaccacctttacccatacatcattctcttcccacttgttctgtcatctataaattaatgataacaaatctatctcacaaggttgttttgagtattagagatattttgttcagggttgactatcagttgatggttgcaatgattagcattatttttatatccatccccttagggtctttcagtttttgttgcacaagctcttaagcatttggagttagagaaagtaaaatgtgttttattactattaaacatagaagttatttctgttcctgagtcttgattggaaaattccacactcaaccccacgaattactgtaggttaatgcatctaatttcacctgttcataaggcaaatgtttatttattttattttttattttttggaggcagagtctcactctgtcacccaggctgagtctcactctgtcacccaggctggagtgcagtggcacgatcttggctcactacaacctccgcctcgtgggttcaagcgatgctcctgcctcagcctcctgagtagctgggattataggcacacgccaccacgccgggctaatttttgtatttttttttaatagagaccggatttcaccatgttggtcaggctggtctcgaattcctgacctcatgatctgcctgcctcggcctcacaaagtgaaggcaagtatttattaaatgcttgctgtttatcaagcactgttcagtccttaccattagcaacttcagtggccttcttttttttgaaggtgagtcattccctcttcctcatctcagacccagccctccctacctacgaggaagtgtagtatgggaactgtggaattcagagttttcactgagggcttggttctgagccttggccacgtaaacctcactcactctccaccctcctgtgttcttctgaggctgtgtctgctgggtaccagctagagccttctgtctgctggctacctagcctattcagtttcagaaaaataatttctaatccaaactacaactatttgaaatccagtcagagtgtagcagtaattcattcattcaataagttcaatcagtgagtaaattcaatttagtaaatgattgctaaattaaagcaatcacccagcaaggctgattcaacaatctcaaaatgtctgctgtatgtttctgcaacgaactttgtagtgtaatctcttcattaaaagattaatattcccttgtttactactatttcaaataatacaaattcacataattcaaggaaatcttccaaactagataacatgatattatatggtaaatgccagaagaaccagcaaaacaaaaaacaaaaacatcaaaccttcactaatgagaaaacaacctttaaaaattgccttaggcatctataatctagattatcccagttttaagactttgcagaatctgtgtctagttgttatatgtgtgaagctggcaacaagaggccaaaatatcagaagtgacatgcaaaacatttacagtcctgtctgtatgtgtgtgttcagggggagattgatttaagccaatattttctacctagcctgcacatttatgttggcaggatttcactggtaaatattggtctaaaccaaacactgaaatctttaatcacatttaaacagacattgcattatactgcattagacactgcattagaaaggaaccaacagggaaaaagtaagcacagctgatagctacaatctttcaagggtaaaaaggaaaaatcagaattcagtaagagtcttcagagggagaaatgccaagaaaaccatagctgaaatacaaaattttgtttttctaaagtctggagctgagttcagttaagtgacgtagtttacaaaccaggggaaattagggccggaacggaagtactgctaaattaggagaaattggccaaaggaaagtgagctagctgtgacatacacagtgttggcttctttctctcattctcaaacaattcttgtttgctactgtgtggagttgggttgccatgaaacctgaggcctaattttatatttcattggaagttctgaatctgtcacataaagcaactgtttgtctacccacagaggctgcaaaaatcataactgttaatctttcctaacacacacagaaaaccccaacccaaaaagagttgcttggctttctttgttcagtgtcttcattcacatccaggggttcttactgaatcatccagaaccccataaatcacctcaagagcctgtgagtctcctactaaagtgttccttcctccatccctcaccacctctgctgcaccaaaccctaccccgcacacttcagacacagccctagactgcttagatgcttactaagaaagtctttaggaggaagggctgttttatctctgaaatctatgcttatcccttcttaattaaactgtcaggccccacattttggtgtagatgataagatttgagagaagcagggatcttgttgggatgaatggtcagtcccactgaagggtgcctcaaagaaaaactgtttttttttttaaatttcttttctttattattatttttttaagtcaggcctagtgcagtgcctcacacctgtaatcccaatactgtgggaggccaaggtggcaggctcacttgagcccaggagttcgagaccggcctgagcaacacagcaagaccctcatctctacagaaaatttaaaaatcagccaggcatggcggtaagcacctgtagtcccagctactttggaggctgatgtaggaggatcacttggcctaggagttcgaggctgcagtgagccgtgatcacgccattgtgctccagcctgggtgacagagtgagatccagtctctaaaagaataaaataaaataaaataatttatcagctcttaggcaagattgaggaggtgggactcccaggaaaaaaaatgttgaaggactcattgtggttattgccaaacctggctgaggatggaaatcacctgaagcaattctaaaaagaacaaattcccagaactcagtctgccaagactgctttatacatctggggtttagcctgggaatcacccccaggagattcagatgcacctcttctatagactggtatagtgatgaatatcaactttgaattcaggctggattagaaaccacgatctaatatatacttagtgttgtaactttgggcagattatgtaacctctctgagcctcagtttactcatctataaaacagggataataactatttactgggggtgtggcaaagattaattaaatattatacatagtctctcacacactgcctgacttatggtgggtcaaaaataaagttaagccaatccaaatgtctccttgagactcacccaactgagatagcccctaaggcattcctgatcacactggaggcaaactgcctcagtctgaatccactaagtctgtgattctggaaagttactgaatattagcaaaaaatcattatttttattaccacctcttttaagacaagcaattatggtggaatgaatgctggcctttgagtgttcacgtcctggctatagacttatgacctagaatagtgcttcccaatagaaatataataaacactctacaggtaatttaaaattttctagtaaacacataaaaagaaacaggtgtaattaattttattaacatattttacttaatatatgcaaaatagttaacatgtaatcaaatatatgcatttattgagcaatttacatcattttttcatacaaagactttgaaattcagcatgtatgttacacttacagcacatctgaccagagactagccacagtttaagtactcagtagccacatgtgactagtagctaccatattgatagcacagtgtagacattccagattctaaagcaagtcatgtcaccttcatgagcctcaataatctcatttgtaaaaatggagataactttaatggctttgtttgcagaagaaaatcagtaaacttgaaagcgcatgtcaactggtaaagactgtatataacaggttttctgctctttacaacacttagactacaaaatacaatgcgattttcataaagtgatgtatccaaggtcgtgtgtgatctgagacatcactcaggatagcatcaggcagagacactctcctctaggcagatgaaagagattttagctagtagtgtttcaagaggttggaaatttcttagtcctcttctcctcctcacccagcaccttcactctcaacagcaaacacatttgcttctactcttcactgactcttgaaattccttcgaccattttcattctacaaataaagataaaattgagggataaataacccttgtgttccctctgataacatcttaatttgaggcctccttacttcttaagctcctatctttttctacaaatgatattctctgatgttaataatttaccaagtgcttattctctgcactcttataatttttataaaattctgctaccagagcaatagctcatcttcttaaagattgtattgtatatatcaagagcactgaacttggagtcagaaagcctagattcaagtttccaggttctacattttctagttatgggatttgaggtgaagcctgtagtgaccagaagacatgaaaattccctgagcttcatcaggcttttcctctataaaataaagacaataatacctctctcgaaaggtagatgaggattaaaagagataatgcataagaaagtggtctataactgcaaagaattagacaactataaaatggtatttagggatttataagccattttgtgcatgctattcttccattgagcagtttccaatggttccttcttgcctgccaaataaagtcagattccttaatctaacattaaaaacctctccaaaatttggccctgaccacactacttttggaagtttatcctactcaacccacttactcaaatcaaatgttctaaccaactagaactctcatatttgtcctacccaaacaacactgaatggtgtgacctatttctaatttggtatatttcttaatgctgtccattgccttacctcattttccaacctctcaaacttccacccattcttctttaccaggcctccaaatctctcatgatctcgttttccctcatgtccttgaactctatctctgcagcctctgaactttgcttgtgtctttcttatgacagctataaaaacccacgtgggattctagtaactcttggtgcacagagacttgcaacaagatgcctgaatgtgggtactcagtgagagttaaatatccaaatctgcaagtgattttgcagaagtgctattgagaggcaaaatgtttcccatataaaaactagccagcctagaaatctaatcaacacatgaatgcaaaagaaagatagagctgattagctgtggtaacactgaataaatcagtaaaaagaaggtgatttgtttggagactagcaaaaaaagaacaaaggacaagtattggacattgtgtctttgatactgttcagtagcaaaggcccctttctttttggtaatgcatagcccatctgttgatatgttgggcatgtctacatttcaactaatattttctgagcttctactaggtaatagatgcttgatgcacaaaaaactaaaaaaatagattctctaccctcaagaaggttagaatctaatagatgagaaaaaccaagagaaatatttgtaatgaaatatggtcatttggaaatagaggtttgcatatggtgttgtgagatcttagaggaaggaggcttaatccaacctcagaatatttagaaaactttgtagaggagatgacactaggctgcatcctaaaagataaggaagagctagccaggtgaacaaagttgggaaaggcattttaggcagatagaaatgcttgagcagaaacaactattatacaatctatctcagcaagggagctgagtatatcaggcttgaggaaaggagccatttaaaccatccaactagttctcctgctctgatttcatgcttaccaagccatcttatggttagaatttggcctcccacatagggaaacatgtgattaccagaagacataaaaagctttttataaattactgttctctattaattcattggactctgatttgccactgggctcttgtgagttgaactagtataaactgaatgaactcaaaatacactaacaaaattacatttctggacctgaaaggctgaagtgacttgaattttggtcatcaaccaaattccaccaccttagaggccatgtggttctaacttatgaatgtttcaaatccatttacctctcttcatctccattgctattacatggttgtagctatcatcatctccagcatagactgctgtaataaagaagtcataatgccatcttagtccattcttgcttctataacaaaatatctgagattaggtaattttcaaagaggagaaatttgtttctcacagttctggaagctgggaagtacaaaatcaaggcattggcaggttcagtgtctgaggagaactgcactctctgcttcaagatggccccttgtttatgtgaaggacctcttcaaggagaactacaaaccactgctcaaagaaataaaagaggacacaaacaaatggaagaacattctacgctcatggataggaagaatcaatatcgtgaacatggccatactgcccaaggtaatttatagattcagtgctattcccatcaagctaccactgactttcttcacagaattggaaaaaactactttaaagctcatatggaaccaaaaaagagcccgcatggccaagacaatcctaagccaaaagaacaaagctggaggcgttatgctacctgacttcaaactatactacaaggctacagtaaccaaaacaacatggtactggtaccagaacgcagatatagaccactggaacagaacagagtcctcagaaataacaccacatatctacaacctctgatctttgacaaacttgacaaaaacaagcaatggggtaatgattccctatttaataaacggtgctggaaaaactggctagccataagtagaaagctgaaactggatcccttccttataccgtatacaaaaattaactcaagatggattaaagacttaaatgtaagatctaacaccataaaaaccctagaagaaaacctaggcattcaggacataggcatgggcaaagacttcatgactaaaacaccaaaagcaatggcaacaaatgccaaaatagacaaatgggatctaattaaactaaagagcttctgcacagcaaaagaaactatcatcagagtgaacaggcaacctacagattgggagaaaatctttgcactctacccatctgacaaagggctaatatccggaatctacaaagaacttaaacaaatttacaagaaaaaaacaactccatcaaaaagtgggcaaaggatatgaacagacatttctcaaaagaagacattgatgcagccaacagacatgaataaatgctcatcatccctggtcatcagagaatgcaaatcaaaaccacaatgagataccatctcacgccagttagaatggtgatcattaaaaatcaggaaacaacacatgctggagaggatgtggagaaataggaacgcaaaaaattcctgtgttgaaaccagtaggtttcaacacaggaattttggggggacacatttagatcataacaaatgctaccagcaactaggatggataattaactaggttactaggtaatgttttatgtgttttggtatggtttacctcatttaatcttcataactatcccacaagatatgcttacccccattttagagatgaggaaattaaggcttagagaaattgagtaactcaaatggcaaagccagatatcaaactcgtgtatgtcttcctgtagatatggggctcttgaatactatttagctaacctcatatttctagtctctagatttcattcttgccttcaagttcattctccaaattgcagccagagggatctttttaaaatccaaatttggctgggccactcctttgaaagagctccaccaagttttccagttgcttccagaataaaatacaagatctttgcatggccttccatggctgtatataacttgatctagcttctcctatcagtctttccctgtctgcgttcatgagcatactctgatgttccccttgcctggaatactttcctctcccttgacacttaattcttattcctcaaaatctcataactttccaaggcaggccttccttcacatcccacttttcagattttgggtccctggttatccctattataaatgtttatagcattctacacttcttagtatctctgttccaagttgtactaagtttttgcataattatttttctattcctcttaggatataggcttcaagtaagcaaaacctaatattcagcactatacccttagagtttcatgatgtgcctacaacataataggcactcaaaaattttactcattaattatttatcgtatcatattcaataaataatagccaacattcatctggtacttgtaatgtaccatgcactgtcctaagcactttacatttatttatttgttaaccagatgctacagcccattaaaatagatactattattattctcattacacagatgaggaaactggggcacagagaagtaacatcttatgtaacaaagttttataacagtaagtggtggtactggaatatgaaccaaggcagtctaaccccagagaccaagcttttaatcactgctctatatccttcataaatattttgtcaatatatttactttgttagaaaaataattggacagcagcttgcctctatccctatcactttcttgtgtcattggtcttcaataccaatacaggtagataattaagttctttgaacatcccttcacattggtggtacatgttttagctggatgagaacagattctcgttagcatataaatgccaaaggcagagttctggagagcaggttttcctaagggtaaggacattaaaagagtgggaggtagaccaaaaggaaacagtgctatgaggctggcacatcaaagacatagttttgccttgactaagcctatctctgtaaaagaaagagaaacttagaccatttatttataacaggcccagtggtttagcaaaaaagttatggaatttagaatcaatatgtcaatcaatataattaaaatgtctccttcattctccctccttttcccatcttcccctctcaatctctctgtccttcttctttgcctccctccctcccagccgcatcatatcactttgagcaaattgttaaatgcatccaagcctcaattttctcacattcataatggaaaatgtatgtcataatgataataatttctctcttggggttatttttcaaggaaaaaaatgagatatgcaagtgaaagtgcttggtaaactgtcaagttatatatataagagccagttgtgattagaagttttgttttacttgtagtcttagaggaatttgctaaagagatcggcatcaaaatgacctacttttcactgttatttcccttaagggcagtgaacctcttcttttatgaatccacccagagtgaaatccctgtcatatgcaattgcaaagttccatatctataaagacatgctaacaaagttctgcctaaagaaaggctatatagggcttgcaaactttggtcttggaagaattgcattgcagtgtgtacatgttctcctgttcttatgatttgttccatagatactttacccaaggttaaaataacatgccctcttgaaatgttgcactctaacctgagtgtgcttcatttaccaaatattatatatttggacataataactcatgatgaagaaaaattatatctaactctaagggaaaaaatcacaaccaagattgccaaataaatagataaataggccagtagcctcaacctaacacctttgcataaagagatgccaattcctatatgtatgaaactattttacattttatcaagtacttattgcactatgggaaggaaccgaagaatggagtaagtatgctaacttaaaggcatgtagagccataggagcaacccaaacgtaagacatctacagggctagaagcttgtgaatgaagctaaaagtaaagctgaatgtaaataatccaattaatacacacttctcatttacaaagatcagaagattatgggaggaagctgagaaggcgcctagcttcacagacttactatttatacaaggaaaagggatttccaatataatcattcgctacaatggacaataccactcctgaagtgtattgttcattgctgtaatccagcacccacccagcagcaggcttggcacatagcagatgctcagtgtacttttgctgaatgaatgaacaaacaacttccctatacaattctccacatctgaaaggccactgacctggtatgtcagttagaattttgtgaaaaaacgatccatcaggtcagctctatattttagaagtggaaaccaacagtctctaacttaagacaaatgtcaagaatgcatttttctgaagtcctacagtgggaaggacgctttaggatttcatggccaaccttacaaatgcttcctttcccagggccaaatcaaaactctgtcaatgactcagctgtcaaatacatgtcaatatatcatcaggaaagtgacccaggaccagagaagtggtgggaaggaggggagaagttcctgacacgtgccggatgctgtaccaaaggcttggcgtatactgattcacttaattctcacacctagtttaaactatcttcctgttttacaggtgaggaaatggaagcacagtgggctacttttcttgtctaagggcacattgctattaaatggcacagttatgatttataaacagctggggcagactctactgtgttccactgaattttgagttagtagggcatcctggtctatgtcacattaaaaccaacatttgtcgttgttttttagctatgtgagatttactcaaactctgttgatacccattgttatagctaaacaaaaggaaaggaaatgttttttagaaattctgctcttgtttttttaaactgggcttcccctagatgggactatctgttgaaagcctacatggacaaccagaaagacagcaaagtgcacaaatcacaagtttagaaatcagtgagttcttataaagtgaacatacctatgtaaccagttcccagaccaagaaatagatcattgccaaccctatagaaagcccttcaagtccctcctggtcactaagcccacaaggtagccaatatcttgacttctattactatagattagtttttgcctctttggaactttatggaatttgacccatactattttttcatatacattttaatatttggtttcctttgttccacatttatgtttatgatattcattcctgttgctgcatgtggcaattggtccaattgttttagccactagaataactttgcaaatagttaccaccttctctaatagaaagggagtccaattatgtgaggcccataaaggttatgtacagctcttttctgtgtgctttctgtggatagaaagtgtgggtgacttgacagataagtttctgatatatagagatatgttggaatatcatttagatataatttataggaaatttatatttgggtaatattgtgatgctttcaattgctaatcatgtgtaattgagggcagagcattttttcctctcagcctcagttttctcaactgtattacaagccatgagacttaaggtttcaaagttaaatgatgccagatacataaagggcccctgtgcctacttttccaagagatcagtgtagtcataagattacacttccctgcacagattgcagggccagcttttagggcacctgaggtctttcaccagtggggccactgatttcataactgctaaaatgtgtccccatgttttctaactatgagcaactagctatttgtggccaggcagaggtttctaattaccctttcctgtcactcttctctggatctctccctcttcccaacaggactctgctaactcacacacccatttctactagattggcatttaaaaagctggggaagttggtctatgaacctaagtattagattaactgaaaaatcattgaaacagaaaaaaaataaaaagatcattgactgaaaataagaatgttgctcagcagtttgtacaatgtgatcctatttatgttatatacatatgtatgtttacacagacacacaaacacatacatgacatgcacaaaggagtcaacaatggtgatctctgactgctaaaaatgtgagattttttatcatttgaatttttggcttctctgcaattttctatttttctaaatgtgcctatatcccatctgtaacaataaatgagatatttgcaaaatatatttaatactaaaaggtttacagtccatttttgtgtttattctctgattctacctttcccatgagaataggatatttttcttatcctcattttagagataaataaatttagtcttcgagaacataggtaatttacccaaggtaacccactgaagcaagatgcaggacaagaaccataccaggtcttctgagtaaatattgcacagcttccctgtgcattaggtagatcagaaaagggaagtggagacttcagaaatgacaacatttaggaaagcagttatgcaattttaaatggaagagatccgagggtaagatgcaactttaaatgcagcattttcaggaataggtgcatctttcagtgctaaactgaatcctctgtttcatagaccaagatatagtcttgctaggaatctggagggaactatttgctctaataatttaatctctgatttcttagtttatgccttaaggtaaataagataatcatcctacttccgtatctatcacacaaagatgttgcaaagattaacgaatagtgtgctgggagctcctttgagaaaagagctatttgaataccatatatcattagcagattaatattataattatttactaaatttctcttcctgtttctcagagtcaaatgcaatacccagcaaacttatagaaggaagaaaatctttctgtgccactcttgttggagtgaaagagggaaagaagagagcaagagaagggaggttggttctccctacttcttccctctggaagtttttgaaagcgaagttcaactgcatgaccatacatggtcccatgacctactcttactgcctctgagatttgcttctgtggtgttaaacattgtttcttttcagggccatcttatgtaagacaggaagagacccagtttcatgggcatgtaacctgttgggttgcacagggccctatgctcagaagggctccatatttgccatcttaaaacttgtaataatactatctttgaacttgtgttttataaatgatgtctgatgggacaatggagtatgtgccagtggcttggagccttggctcatgcacttcctcacttcctgtcacctgcctgtctccctggacaagatcctaaccatcctctcctctgctcgctggtgccctaggaatcgtccagcttcctttttcccacctgcacttgtgaccattgctgccctccatccccaatcagggtataggcacagggagggtctgagttagccacatgtgctttgtagcctcagatgggacatgttagcagccgtctttgccctgggctggcatggctgtggtagacagaggccaggtcttgatggggatgaacctcttgtccacccctgtttcaggtacccagcatgtccctgctaagaggttgcagtacccttagcagtatgctaagatccaaggggttgtctgctgtggataggggcttggggaccatgagaagggagaaatacctaattcgacttccccagctcttgtgcctggtggggacacagcttgtcagtctggcggctatcaggaaggagtagccagctgctggtgagctatgtgcgtgcccttagtcataagaggcagggccttcaggttgctgtgagggtctgcactcacctcaaggtatcccagtgcctgaaataatacaatatttaaacacaccaaaccattaattgtgacaagtgtaccataataatgtaagacattaacaatggggaaattaggatgtgggatatgtgggaagcccctgtgttatctttgcaatttttccgtcagtctgaaagtattttaaaataaaaagtatatgaagaaaaaaccaccatgacaagttgaaagagagaatgcagaagaaaggaaaaaactttatattttagtatcttttatagcaattttactgctttttcaacaaggggccctgcactttcattttgtactgggcctttcaaattatgcagctgattcttactgtaaaatcccttattgaatgtgcaattcagctatctctctttcttttcttcctcacactcttttctacccttcaatgccaggccttaggatttctccaattgccattagtaattctcctatgcatctatcacctactaagaactggctaccatcctaggcacttcatatattttatcttatttaatccctttataactttatgagataaatattttatccttcttctacagatgtatgaaattgaggtctaggaccacacagtaagtggtagaagagaaagtcaatattcatgattctcactccaaatctggtgctttttttcacagtgctacagatggaccattcagccttcaggtgcccaggtatttgtaggatgcttaggcaatttggtttccattcctccaattatttactgagtatctcctaggtgctaaaactacaaagttatatcagggaggccagtcctgcgctgctctggtcattttctttgattgcattcataggtagcaggtgtttgatatccccctatttagtacactctaacctctgtgcccatggcttagttgccatgataggaagactataaagtggacacaaagtcttgactgtgaattaagaatttggaaagtgatactctagcctaactaacattgcttcaaaatgtattaatttttgcttaaacattttgatggctgatctgaagaagagaggacaatggagcaaggtctcttcatatccattacctgttcacccacatctcacgttgtaccaactctagaagtacctgagtgcttgttccatgcagtagacaatgaatgagctcactggtgtatctttgaagagtccttctcttttttgtacttctgcgggtataattactgtatgtatttccttggtcaagcttgaatagaaatcagatcccttttttcctctgcatgaaggagaaatgtgatgtatcatcttgcagtcattttgcatatcagtggattcaaaaggctaggagcaagctactttctccccaccgtcctggtgaatgtccaatattagttacagagaaccacaggttgtgatgtggaagacatgaaggtagtaaatccccagcagctgggaagtggttggactttttcctttattagaggcagggaatgagaatgggagggttctgtctcttcagaaaaggcttccttggaagaagtgctcttctggaagcaaacagaggaggcaaggggttgtttcggacacactagagagtaagtcagagaatcttcgtgttgaggcagcattgcaaaattgaagatgaagaaaggaaggaaggtatgtgtaagtctggcttgaaatgagttttattaaaaacacctcaattcttgtctgcacatttttgaagagtgtgaaaaaaaaatggaggaagttacctccagtggttttgtggctttttaagcatgacatacaggatattgaatttaacccctgtttatcttgaagtgtatgaatatttcggggataaacaaagcaactattctttgaaatatgcgtctgtggccaagtgattccagttacttggaatcacagttctgttgattctcttttctgcttcaagtatttgcacaccacagacataagattattcatataataatttttaaaaaccatgtggtcttgctagaatttctgtataaatgtataaaaatgtcttttaaatatggcaggaatgttatattagaactccatgtgagattttacattttattagtgcctattgtgtgtttgtatttcagaaatcttggtagagtttataaatgctatttctctcaaaaacagtcgtgtatataggagagtccaagtgctttttacaactctctgtagcttcattaattcatctagcatttataaagttatttcagtgcttattaagatagatttcttaagccagtaacctgaagtatttgtttagattcacaaacttttggatataaaatgacatgttaaggatatgtaaaaagaattttaattatctagcaaaaaaatgtgattttcacaacaatattttttgtgtgaaataccaacaatatttccagaaagtctagagtcttagggcaacaaattggagcccccagctttaatcaaaataaaaatctgcagagtgttcacatctggctccacctgaaagtccggttcagaatttccctgtgatcctggcacttgcagaagggaagttttagctttgtttagtataacaagagctgcaggactcccaggccaataaacgtgttcacgtaaaactccagacagcttcttttagactggagtcttatcagggagacctcattttccctctaattaaaggaaagatttaagggagagaaaggaatagcctatgcctcttacttgtgcgggtcagtgttcgctgaattagaagttattccaacatgaacacaatcctcaggatgaatgactgcctagactttgaacgtaatggtcaaccagttttcacccgaattttgactgtttcatttagaagaaaagcaaaatgagaaaaagctttcctcatttctccttgagatggcaaagcactcagaaatgacatcacataccctaaagaaccctgggatgactaaggcagagagagtctgagaaaactctttggtgcttctgcctttagttttaggacacatttatgcagatgagcttataagagaccgttccctccgccttcttcctcagaggaagtttcttggtagatcaccgacacctcatccaggcggggggttggggggaaacttggcaccagccatcccaggcagagcaccactgtgatttgttctcctggtggagagagctggaaggaaggagccagcgtgcaaataatgaaggagcacgggggcaccttcagtagcaccggaatcagcggtggtagcggtgactctgctatggacagcctgcagccgctccagcctaactacatgcctgtgtgtttgtttgcagaagaatcttatcaaaaattagcaatggaaacgctggaggaattagactggtgtttagaccagctagagaccatacagacctaccggtctgtcagtgagatggcttctaacaaggtaagagatgatctttttattcattaaagtgtgatcatgcagggagctccagctcccctcacccctgtctgcagcagagtgcaccagggaatgctaccaactctaagaatatgtttgttgctttgtctagaagattctcttccaaagtgtcacactctacttgtgtcttgatgctacagcaaaagtttaaaatcctcagtacgcttcaatttccagaaacaaaacttctctcttactgatgcagtttggaataggtttaaggtgagagatgtctgtctgtaaagcttccaaatcaatataacattgaaagtgctttaaaatttttttacaattatcaggaagctaaaatctgagttagtcttgttgcattgcaatcaggtgtcacatatttatttttaaacaagaaagtagtttaaccttcatatatcaatgggaaagaatggtctgtgttgaagtttgataaattccctctaaaaagaaggatatcctgggattttctaagatttcttttgcgatgctggcatgacctaagataaaaaagaaacaatatgctttgtctccaaaaccagaggttttctttaagtttgctgattttcatagtgaaatcatttgaaattgcttcatgcatactgcccccaaaatggttttatttacaatccccagacaaagcttaatgttgaagagccttaattatctatcattatatcatttgtttaattaacacctggacttagaatgctaatttatgtagtgagagttgttgctttttgtttgtatttttaccttggagaatattatattaaatacatattgctataaagttatacaaagttatatatgtgtgtgtacacacacacacacacacatacactttgttaaaaagccttacaccataccctcataggtgcacatttcagagtcccagtcattctagcctgaagtatcatcttgttgtctacgtttctggggctgagaagatattttgctccacacctgccagcatgccctttccagccctgaggtgcaccagtgagtgtgtgtcccttctccagctttcctggggtaaaagtaccacctttggatcaaggcttgctggctgcggctcagaggatctgcgcagaggaagcagtgtgtcctcaggagatcctgaaggaggggaggggggactcttcctacttggaactctttgtttattggttaatgaaagggcaaaaataagtccctttctaaaattttagtttagagtttaagttggaagggaaaaaaaaagaaaagaacacatttgaggattaactatttattgacttttctctgaagttctcaattgaaggttaaactcagggattttccaggctggggtaaaactcaaccaactgcttccccatgaggagggctttgctgtgtaacttctccaaatcacactgggactccatgtagaaggactttcacaaggcttgagcctactttggagcattagcagacactctgttccctgtattttgtggtaattgacggctatgcaagatgtagatccaacatttatggggtagtttttcaacagctttcaccatagagaacatggcaaacttcaatagtcaccaaaatatactaactagagtcaccaagataaagcaggcaattaactccaagaagagaaaaagagtaccccctgagaaactacaaattgccattaattttcattttgagtgtcaatatgctgtagtattctaatcccattcatgcctagagtgctggaattagacattgactgtcttgcaaatttattaaaaataatcttattcagcatagtagttagtaaggctctgagaccaggcactctgtagacacgggtgaggattccaatccctcaggcttccgctcctcctttatggtgttgtgtgcaggaagcaatgaaagttgaatagagctaaccctaacaaaagggctaaccttcaatgctgacacagttagcttaagtaaaaagcatgcagcctcagtcattttctagttctacagtggaaaggttgtcagggaaagcaattatttagtgcatgaatgatgcccaactgacagctaagattaatttttaaaaatatctctttttactttactacctttaaaaaattattgattattcagataattgtctcaggttaagcttgagcataacatgcaccatgacacatatgatataaggcaatgaggccagggagtggtggctcacgcctgtaatcccagcactttgggaggtcgaggcagcactttgggattgcttgagcccaggagttcgagataatgcaatgcaaacatttttgtggccaccagaaagaaattgatctacaccagttctttgggaactgaattatccatggcaaaaaaaaactatattccatattcagttttcaatgttgctgaaattatctgagatttccatccaagttgacatcttaaaactttatcatgatcatcactccctttactatgtagtcttatttggccatattttgcttacccttatcaactaaggagccagtgtaaatctctgagttgcagatctggaagtgatgtgaagaaatgttatagagggagtgtacttatcagtggtatccactacatttttgcaaaaactctgtgttcctagttctgtttcagctacgtggccactaagttttgtttgcaatgtctgatcttaagaacagcgataggtgaaattgtgttatgctgaggggtatttgggaattacataagtgcagtctacatgcaactggtagagagttaactgtgtttggtggaggaaaagcaagcatctttcatctttacttcatctaggtagggttgtgcttttttagtttgtttgttttccttaatcctttaaattttgaagaaaactgagtgattcaaatctcctaaaagactttctcaaatgtacttcatagcctagagagttagctaagaaacatcgtcctctgtttggcccaaatttctctgatcccttaatgctggccacagtccagatggaattccagaattttagagaatggtgctgccaggtaggttagtcttgtaaattattttcctccaagaattactagaagatggaataagttcagcagaagttttacaaggcaatggtattgttatttaagatgaaaaggatggctagtgaacctcctgccagctgcccaaattcgattagacatgttagagctagccgttttgcttaacaacagattgccttcttagaattgttcattaattttgtgtttcaattttcatcacctcctgaattagaagaattgtcttacacttcagcaaaatgcatcagagcatgagttcctcagtggcaaaacagtcagatgttttgaaaacaggatgctttggctctccattataaaaagaggaacggaaagagaaacagtatagaaaggaagaaagcaaatagcctcagcagggtccccagcccaacaacggcataaacagtgacctatcttcctgaccttcactgtggctcagttcctgacctcgtgtcaccaaagccaaccaacgtcattagaggaggataggaggaatggcgcagctgctgtgagggtgactacaatttcctgtctccttcctgacagacgcagtcagtaaagtacagggttgcaacaacagtggctgaggaaggaccaacccagaacaatcccagggaggcgtaattgtgactggcggggaatggggaggtgttccttccctcattgtactgagaaacctagtctttcacctagaattttcaggtgaaaaacgtcaaaagggtcattcttacccagaatgctaaatgtttttcaaaagatgaacatactgtggtattcagaaaagctatattcaagcaactagtcactgtcttcacttcccccacaaacgccctccactgtccttttcattctccattggtttggctctggggctgttttatatgcagaacaaaggttgggtgctgctgggtgaaaatggatattctgttgttgaagagtggccctgtgtattagtactttttttttagaatgaagcattaggacttagcacttgagtaaatgtttgctaagatagaaatggaagatagatggtccttcttctcttaaggcattgtgaagtcggctacagataaccatcatgaggaagtgagtcctcctggctatgcaggcttatttttccagttcttcaggtgcagccatactacagtactaaacatggagcacaaaggcaactaattgccagtgctcttgggtttgcaggataaagtcacactattctaccaggccccgagccagctgggaattaggctgcatgacactggatggtgatcatgacaggctgattgccctaatgaggggtgaaccattttgtatttaactaaataatcaataactatggaaaatgccagctcctgcagaactgacaggaaatagatcttactggccaatggattcatcttagaactctgtaagagagagggtagacaggcgctcagtccttgaaaggaatattcatgccacttttgcctaaaatgtaatgatatgattacagcagtgccgcccttagcataagatgcatccatttgctgggccctgtgctgtaatcagagggccttagcctggccttccttctgctgccctccacccaaggaagtaaggagttggccgggccaagggagcagctttgctcccctctctaaactacattttgcatctgctggacccccacattctctgtccaaatggctttgaacccacttcccggccacacaagcctcttcctgggatgtgctgcaggcatacacacccttaggcctaaggagtttaaccaagaggcagcaatgagaggtgtgaagagacttgtgtaggaggaacttgggtaagcaggctgcggtccagggctcacgacggctgctcacaggtccctggagatggaaggacatggggaaagaggagggccaacccatatccaaggagttcaagaattctaaattcaacctgaccttccaggctgttatggagggatatctgtcaaggtaaaggagatagctcaatgtatatctttgtatatttagacttacagtgtgtggccccacacatgttagaggtgaccctggattagagggcagaatagaattaaaatcagttctggtagccaggtgggcactcacacatttttttggttcaacttttctctctttactgctcagatttatatagactaaattatggagggagcaaaataaagtgaaaagagcctaggaataagccatgagtttgagttctagccctgcctttacttaggtatagtaatatagacaataaaactatttggaatctttccatattctcttctataaaacaaaataattggaaaagacccagctcttcagtttattgattgaataatattagtaaacaacagaactacctttacaggtgtatgcaaacattgtgctaagctctttacctcattctgtaatcaatattcacagtaacactttgaaataggtactgttattattcctgctttacagatgagtaaagtgaggcatacaaagttgaaataacttgcttaaggtaaatcatagagccaggattcatatccagtccatctgacttaccatcaatgatcccaatgaggcatataaagaaagaaaaaagtttagagttatttaataattcttctaaggggattttggattggttggtgggtgatcttgttctttcaactgtggcaagcattattagtgaggcctagttcaaatttatattctgtagctaccatactcacagcctctaggatggccattaattgccctaagctcagtcttcttgcctgggaagcagtgtaaggggaaagagcaatcgcaattatagaaaatggttataaagtgctcataaaaatgcaaataatagtattaaactaatccattgcctatttcagatcaatttgctcacttcactatctgtttcttaaaattctccaacatagcctaagataagatagtaaaggtctgttcaaagcactgtagactaaccccaaattccctttttccctgcttctcaaaataaaaagggaaatagagataagctattcttggccgggcgcggtggctcacgcctgtaatcccagcactttgggaggccgaggcgggcggatcacaaggtcaggatatcgagaccatcccggctaaaacggtgaaaccccgtctctactaaaaatacaaaaaaattagccgggcgtagtggcgggcgcctgtagtcccagctacttgggaggctgaggcaggagaatggcgtgaacccgggaggcggagcttgcagtgagccgagatcccgccactgcactccagcctgggcgacagagcgagactccgtctcaaaaaaaaaaaaaaaaaaagagataagttattcttattttttaatttatatgatcattcaaatgatttgggcaatttcattatatgccacaacctttccaaggcatggaacatgaccataaaacagagaattaatgcttcagtaatatgtaagggaaatttttggaagtaacatgtccactgttttccttgggcattgtcttcaaataaagatgaaagagaagattaagctatttattctttgtcattgtttcagttactctttctatgacaaaatggagttgtattagtgagtattagtattagtgcaattcagtattccaagttctagtcttctcaaaacttagcaaatcaaagagtttgaaagttatttggtgctttgtagtaagtttgatttgtaatctgttttgttttattcaaatagttcttcattggttttaacagaaccatttctttactcaatggtaatccatttggcccaatctttctgcctaactcacttgaaagtcctcaagtgagcaagtctctaaaaaacaaacagaaatgaagaggacattgcctttgattgttttacctctggctacctgataagagagcataatagtctcaaaatctgataaataaatcattttaaggggagtatctttctccacattggggaaaaaataatagttatgtttagattgtcaaatgtaaatgtaaatgtagaacactagtcttcaaaaatagaattcaacccgttagcagaataaatgtttagtctccatttttttaatacttttttctcatcttttaaaaattgtttagtttttttttgtttgttttttttgttgtttttttttttttagaatatgtccgagtctaaaaggctcctaggttgtatgccattgttgtctatgaaagaaaaaccaagggcgatggtgcttgcatttgcagtattcttccaaaacatttttcttctgagtaaaagtgtgctcaacaagtggagatagctcagacatctggaagccaggacttactaaacaagaagatgccagggcaaatttgtgccacagtcaataggtttcacactcttgaaggcatggtgccagttgtcaatatgctttcctgagcatcctttccctctagcatttttcagggacctaccagcacctctctgtcttgctcacttgtacgtgatgtttccctcaagtggtgccaaactgtttagtctcttgtgtatttcactgtaacttcctttgtttgattgactttaaagtagccaagtgcttccacaaagaaaggactgttaagttatttagaaacgaagaagacagtaaaactcctgtttcttttgtttctgctttgggaagtgccagataattttttcttcttatggaatagattttaaagctataaatcttgccattctgttcaacagtcacttttttccttctgctaattaattgtaattttaaaatgtatcagttttgaaatctagagcccccaaagattgaagtttagtaaatttattaaaataaaatgtatcttcatggctcagtaactttcatcttctaatttttttagctactcaaaataattataattttttaattaactattaaatactttacatggctgccatcccctcactctttgctaacagcatagtgcataatgttttaactttaagcaattataaaaatgaaatttgaatacacatactgggaagtaaaaatgactaagccaatttttaaattttagatttaggacaagaggtgttggcatttgatatctaaaaagatagattttaagtagttgttttagaaagaaaatagtaaaaagaaaaattatcagtaaataaaaatagatttcaactcaattatataggctatgctaaagccaatcagacagggcacagtgaagtattaatttaccaactatctaatgtctttggtcactattgatgaaatttgataaatcaaaccaaaaaagatctaaacattttctttctagttatagttttacatgattacattagacaaagtcctagaactttaagcctagaagagagccttaagtattattttctatttctatttgaagtcattttatagatgagaaaaagaggtggcttttgccactaatgacaagtgaggattaaagtacctaatgtactccaaataactttgtaaaatatagagcacattctaaatgaaaagtaattttattatggcatgacttctccaaagtcttaaggtgtattagtgggattcaggtattaaagtataggtctgatcataaatctggcttactgttcatcttcagcaaaaggctagatatgtttgagaaagacatgggacattctctcttttgtttacattgacttttagacttctcattcttcatttacgtttcttgagtaaaaggtatacataagtgtcttaataatttcaagtaaagagaactaatttagtatgcctgaaaatttagtgatcaaaacatagcaagaactagttggagtgagttactttaaatgcccctggttttaatttcagaatttttaaaaaagccttaaatttttgaggcttttgattgttgtttgctttctcactcattccaatgtcaaagtttaggtagtaaaaataccctgtggttagtgtaactgcccttaacttctttctatttctttctttcctctctctgaaactgaagatgataaattggaaagttttaccacttggattgttaagccttgggttctctctgccactttgcagagctgttagcatggaaagttgaacgtgagatggtgattccagtttgaccctctccctacaccctagaatgtttctgcacaatgagccagattatgtaaagctctcacagctcaaatataatttctagactcttgagtcatattaccaagatcctagtggagttaggtacaatggtgttggcagctgccttgtaaatagtttaaatcaaataagtctaattcacagcatatagagacacatttttatgtatttagccaacttaaaatcagtcttagtatgtgtagatccctaagttagctgatactgcaagtattttgccataaaatttggataaataataaactattaatgtaattatttaaatgtcgggaaaaatcaagggaaaatgactcgaggaattgagcatcttgggataatatttattaagggaaattattccagaagatccttgagagtctaacgttagctcttttttctccataatttctaatcattatttacatttcaaagtagaacaaagtaaaagaaaattccttagtatataatgtaagaaattaaaagaaaatttcgaattcttaagtgagtaagaaagcttagtgttttggttattggaataagatacagaaaacctgaattaaaaagctaaaaagtgactgggcgcagtggctcacgcctgtaatcccagcactttgggaagccaaggtgggcggattacttgatgtcaggagtttgagaccagcctggccaacatgatgaaatactgtctctaattaaaaaaaaaaaaaaaagaaaaaaaagaaaaaaaattagctgggcatggtggcacacactgtaatcccagctactagagaggctgaggcaggagaatcacttgaaaccaggaggtagagggcagtgagctaagatcacatccactgaactccagcctgggcaacaagagtgaaactccatctcaaaaaaaaaaaaacaaaacaaagctaaaatgaggccaggccagtggctcacgcctgtaatcccaaaactctgggagccctaagagggcgaatcacttgaggccaggagttcaagatcagcctggccaacacggagaaaccctgtctctactaaaaatacaaaaaattagccggacgcagtggtgcatgcctgtagttccagctactggggtggctgaggcatgagaatcgcttgagccctggaggcagaggttgtagtgcaccaagatcgcactactgcacttctgcactccagcctgggtgctgggtgatgggagtgaaaccctgtcaaaaaacaacaacaaaaaaaaacaaaaaaaactaaaatggagattttattgagggaaaatccatttacaggctaggagaatcatttgtgtataaaaaggaaaggcacagattttttttaaaaaagagagactaaaattgttagtagctcctcttgattaaaacagtggacttccaacttcctctctaccctcaatgtcagaaaatctatggaaaatatggcttaagaatattatcatcacttgagaataaagaaacagagggatttaccctccatcttcatattccattgactagaaaacttccccttggctcaaacatgtcatcagatcagaccctgtgctatgattctgctcctaggacgccaaactgtggggctttttttgaaaccctcccttagctattctaacttccataacattttcaaaggccatcctcttacctatcttatcaattaataccatagctaacattttagttatctgggattttatttatgtctgctcagattgcaagtttgaatgtttgagactccactttccttgcaggattcgggctaatacatgccaaggaggcatagatttctttctgtttaattgtaaggatggaagtgaaaagcaaagaaagtttttgtcagttggtggtagttgatttttggtttattttaaaaagctgtctgcagttttcttgatcatttaagaaatttgttgacatggcacttttaatagattatcctgcttttaaagaatgctggcatgggtaatgacctcactggtgggcacagaacaataataaagatagaatttttttttttgtattttcagaaatttaaagttatgaaacatttttagactatccagtggcaatgtgcatttccagtatacttttgtatgatggtgagaagctagggaccttctaatgggtcactaatgaaatggactccaactcccactctggatctctcactcataatccacaaggattaatttaacctgccagatgctacccatttagcaagctgaaaggacacagtgccccccaatgcctgtagccttgtctgctgttattgctattgctggctccattctataagtgagtcagatgatttagatacatatatgtttactaatgcaatgggtagtttttcttggccaggctcagtatattatttgtgttcttgtcagggagagctaccagtgaattttttcctgctgtattttaacactcaggaactggttgtgcaaagtttatttgcatctttcttgtgcattgcatgggagtgtccttgagaatatcttgtaaacatttgctagtattgttttttaaatatttaaaaatcagtatcatttaatttcagagaatttgcttcaacttactggaattaattaaaaatgcttttgtatttatattttttcttttacatatttaaagtattaagataaagtcattgtctaatgttgtctgccatagtaaaatttgcaaactgagaaaggtcacatactgcttttcaagactctttagggcctttaatacagtgctaaaatagaagaactttgtcaaaaataaacaaaagtatgaactccttggtaggagtagattctctttgttttaaaaaagttaaatacattgggttaaaatgagcaaaatatgagctccttttcgtaaagttaataaaggaggaatagagattaggaaaaattcagaaatttccaatcactgcttttcaaatctaatcacatgatccaggacttcatttcccagaaaactctgcatctgcccgagggaacattagttatgagacagtgcagagatttctaaggcccatttcttcacttaaagtttatgtgctctcaaagcttcctgtggtaccaggatagagcattaaatagcgttattctctttgagttatagctgtttcttatttttgtgttgttagatccaatgtagcatggtaataaaacatatttgaagcatcccttcctgcatacacagcgctcttacctgtgttctcgtatgacactcaccctgaggaaggtcttattgtatccccattttcagatatgaaactgagattcgggaaagataaccgatttgtccaagtcctttacctactaaatgtcaagacatagaatcaaatcttgttctctttgctcaaaagttgagcaaagttgttctctttgctcaaaagttgagttaaaaataaaagttaaagggaaatccacaatttattatattctcgtataacttgttaacaaaacatatcatcacagaattttaaagctagaaatcagcgaagtcttgtttttcagacctcagtttagatatcacctcttagaaagaccttcttttattaccctaattcagctgcttgttggttttgcaatttactatcacaatttatggtttttggttttgatcatggaacttggtttttactgatatctttcattagactgtaaagttactgaagacatgaattgtgtctaccatgttcactagtgaagccccagcagttacactagctgtagacacatggtaggcattagaataaatattttttgatcaattgcatgaggttcagaaacttaatctaatttgtccaagaccaagtatttgttagtgataaatccattagaaccctggaatcctgtttcctgttgtgcggcaatggctacatgtaggggcctgccatgcctaattccagctttctaattgttaggttgcatgagaaaccctcatctggttcccaatgacccccaaagtaccctgaaaaaagggaaagcttattcctacccttctctttcatccagagtcagataacaaagaacaaagttgtcagggaccagtgctttcttcctgtgagcagaaatgtgaagcatggttttggttggggtttttgtttgttcggttggcttttggttcagttttgcaatatttggcttactattctctcaaaaagtctgcatcctgtggacaagaatctaagccctttggagactagcaatggctattccacactctctggggagcctatttatgagcacatgtgtttgtaattcagccactctccatatctgttggagaatagcagcctaattatctgccatcatttggttatgtttttcattcctggcatattggtgacactcctctcacctgagccacatattcaattaattcatatgtgttaccacattgatcttaactgtgaaaatctgagcaaaatgcatacttggtgcagttatcctcatgtcaggtagtctgtggtcagtcacagcttttagtcaatagataaaaagttgtaaagtgtcttaatttgagaaaattggctaaaccaaagaagcatgaatggatagttaccaacagctggatttctccaaatagactctttttttacggtttaacttaagcataagaccattttgagttatggtgcttttcatttgacttgcttcatctatctttctggcaattcttgtttacgctccttagactggtgaataatctaaatgtcaaccagagagtctgaacttctatgagtaactcatgtgtcacataatctatgtgacatagtagtgcatcacacctgcagcagcatgctatgggaattctgtaattaattatatatgctgctgtcaacaatgaaaagaaggtgttcaagtatcaaagaaccaactgaaacttccacccaaaagcaaagccaaagtgagaaaggtaccatgagctcagattattttgaaatttacagataaaacctagcttcaagtacaaatcctgtggaagaaagagcacacacttggtctcagacaccttggcagccacttcacatatgttattcctaatcttcccatttcaaagatagaaaattctagtctctaagagactcaatgacttgctaagtttctcagactaagttacagtacatattttatttccagactcagttgaattctcagatgctcctatgtcatattttatttccggactcagttgaatcctcagatgctcctatatcatgctgttatgacgttgggttagctgaggtcactggtaaggcaaacctgcaaccagcactccctctacttcatgtttgcagtagaagctgcctctataaaccttccgtgaacctaacaaacctatgcatcttgaggtgcattgttgttcaaagcatctctccatctcttctaaattatgatagctaataatggaaaacacaaaatacataacaagcccaactaccttttttaataggataaaattgcataagaaatagctgtctatgaaatttatgtctattttatgttatgaaactattttcatcttttatagttttagttaatagtttatgtgtgcaaacctccaacctgttacaaattttcctcaatttgccggtgcatactctagcttagggattactgaaatatcaaaacagataataatatatatgctttcagggaaggaaaggatagatctatgtagtccaaagctttcttttatttttttgataggccctagagttgatcttgaaaattgccagattaataggctgtcccagccctgagaaatcgctaatctagaagtggcaattcccaaggcaggttttgaagcattccattgtcttttacctcaagggatgtatgaaagtcactagctgaaatcaatacaattaataataaatacaatgtattctacatggtatttttaaggggtagagtaataatctcaaaaacaagctatgatagatttttgtagctgcaaaaaatattagaaacttcaataaggcaggatttaaaacaacctaagaggtactatagactgaaaatggaattaacttcttaaagagaatcatgaccaatacgtaagggttatgaaaagaaagtataatatttgagtggtagtttccctgttctgtgtaactactttcatgtcagatatgaaggtcctaaaacataggtgttatttttcactagtcaggaaaggacactagactggatggtctgtgggtctgatccacagtaagtgttctgattgctgaaaaatactataagttgtagagcttctagctgcgaaatgtttcaaaataaacctttgtcatctactttggaatcatattaatgccctgtggccttagaattgactctagaagctttcagttaaatattagccgttatacctgtacagaaaaagttgtagaaaggcttaaaaggaaaaacaaaagagtgactgaataatgtaccttgattccttgatttttctcagttactatgatgatttttgtcatctgttgaaaaaggtttctgctaaatttaattatcagatcatcatctcaaatcttcaaagttcctttttttgtctttctctattaacagacaaattaaaagggaaggatcaagtatatgaaatgaaattgtgatgctccaggaacagttttaggtcttacgtttctcattggaagaaaagtcctctgtcaaaaagaaaattttgaaaagtttaaattatctaaaaatatacagtgcccctaaacttaacatatataatgagtgtatggcctggaaatccaatctcttcataggctatttgcacatgcaatatcaggaccatacttacagttaaaaaaaaaaaaagataaagaaaattcttctttatctgaaattcaaatttaactaggtgccccgaatttttatttgctaaatctggcaaccttatatatgtggaaacataatatagtttataaatattatatatatagtttaaaatgcatagtgaatgtatcagtctttaggtataaatagttacagtatcttttgtccatttgattacatcactgcagcaactttcagagttgagagaatgttggatcatgagaaattgctataaacattcttatgggaatcactttgggtctaggaaacgtcaattttttagtgttccaataatgtgtgttatatcatctcttgagaagttttcagaaattctgagaaaaatggacagcagaaaagggttagatagataggaagaaatatgtaataatttggggagctgttcaagccctaatctcatttaggagattagttatagagcagctatattcaaatttgtttgatcttttgatatttttcaattctgtatgaaggcattaatggtttttccctgctttgccttttaatatgtcacttgagcagagacttgtcctctaactagcaagtagaattgattctattgttgcttcatcataatttttgatgcagaataatggtagatatattcatgcttgtttttcgttgtatacttacctattgattactacgttgctgagcagttaagacaagaagcactcaattctaacatgtttagaagagtttctttctgatttggcacatggacagtgagaatgatctcactgtgtttgttccctggcacaccaaaggtttgctgcagatgttagtacagcagaacttgtttgctaagatgacccattatggaacactagctgattaagcagacgttaatggacaattgcatgtccattattacttctttgaccatgttaccaactcaattcaattgcacttgcttttcaaataagacaaacctgtcaataaagaaactggacatcaagtttcaaatgattggtagagtttatagggaaacacaaaaaggagggaagagatgagatgcacattgtcaaataatctgaaatgttaagaattgtggaaattgttagtttcataaggagttttagacaagcacactatatccctcattctgtttatttctttttcatttaaaacttagatttgctttacttctttgggtcttcatttcttcccatgcaaaattcctgaaagtcaaaaggaagattagaagctagccattttaccactaaagaaactgagccccaagaagttaattcagcttacccaagattacatatttgcttagggccagagctaagacagggacagactctgtttacttcatttctcactaaactgtaccactgcagtttcgacttctttctaccactgaaggcacagaatgcactgaaggcattctgtgccttcaggaggaattttcagccccttcactttcctgatgcccgggaattctttttaagttatgactaacaaagtataaaacatgagtcaaaagttagtccctaataaagtcattgtgactttaatgacttcggcagttgtttcattctgcaaaaacaggaagatcccacacaataaggcgcctgtctcacagctgggctcctgcgtagacggccacccacaagagtaactaactgctggggctgccttcctctctttgacacctttttattctctgttcttacagttttctcctactgacctcatcctgaggttatccatgagaggaaggtacctgctttagctagtctttgatagggtgaagaatagttttaatcacttaggagtcactcctaagtgattttcaggtcaccctcaacaggcctaaattagtcttagaagaagctctttcatgggctttatactagcttcctgtgttatcactattctggactgttttattctcaaaaacataaaatccccaaattttagatttgagaagagcctgcgatcattccagttcactcctcctatgtgattagtttaactaagaactcattaccaagatagtgcctatcttgcctgcggatctttgcataaagctcaaactaattctcccatgagaaatatagaaaagtgaagaagtgtcctatcacttcagaagaaactggctcagaagaaataatctctgtatgcagtgttaaaactaaagaaaaattgaagccatcaaacaaaatgttcctatcaagtgtaattgaattttagcttttattacctattctctacttttaaaataacttttcactattaaaggaacttattccaaaaatcagacaattttatagaaaaggtatattctaggccaataatattaaatcacatatctagaaaatataccttcttcccttttcaaaaaatagaagcaatttctagcagtgtatgtgaatctaatgttgggcataagcttaagaaggcatcggaggaattttttattagagtttattcacaaattttgcttgtctgtgttgaaaaggggcattggccatttcctctggggacattatttctaggtaggctgtaacagggttttcctgtgaaggcagattcttagggaaaatagtatctgtgtacatgagatggtagagacacatttatctttaaaataatgtgttcctgtttgtggatttctctactgaatttaataaagtaaataatgcccatttccttccaatccagtaactccttgggacacagttttacccaggagctattttaccttcgagtctggatgaaacgtgtaacttaataaatagattccaaaagtcttacactatgaaactctgagggatgataaatgcttcccttcctttgttatggtctgaagcattttcaatttgagttgttttcctcagtcatgtagagggagttttgttttctgggaagtcttggttgctggtaaataatgtgtccaaactgtaggaggcagccacagaatttatcatacaagtatgaaatgttagggttgatcattctcattttacacatgagaggtgatgtaactacacaggagagtgagagctgagaatgaaaagtcaagatttgtctactacattgtggctgcctctggctcaacagaaacactcccatgtgggagtcagatgctgaaagcccaactaagcctagctcctcaactgtctcctcaggcttaacttcaaacataattcatatctattctatttcttaatgtgtctcatcacacagttaaacactagtcatactaactggactctacatatactagaatgtaaaagatacccttccaccccccgccgtctgctccttgaaggccatgtctgcctttcttagtttgtacagagcccaacataaatgggcccttcataagtgctttttgatgagagcaatgattgctttcacatcagtgtggttgggccctcccttatggaggaggaaaaccaacagttgttgctaagcaacatttaaaggactaggttagtttctgacactaagtgacctccatttgcatacttcgccatgttgtgtgttttatggttgccttaagatgactatgttttttggtagcattgctgtgcccttagcaaaaggctcataggagaattagtttaagcctgggaaggaggaaggtgatattcatctgttaatgacttgcatgagtacactgatcccttcagtaaactatgcgggaaaggtgaggagtttggtttattttcagccctgcagctgagagccacctccctgattccatattgaaagtgattgacaatgtatcccaacagggtcctgtggcaatggaagactatagaaagaaaataaacagagaaatctttcctcttatagccttttatgattcagtttctacctgctcctatcttctgagcagagttgccgatatagctagtaaagaactggtcctaccctctctagactgtttgctgttgtggttaaacaacatgccctaatatatctattcctactagaatgaaagctgattaaaagcatgaaaagagtttttgtttgttcctttgtttttttttcactgctatatcatcactcttttccctggtcattttaggtattcaataaatggttggcaaatacgtgaaaaaagggcattattgaactactacaaacctgattgactctaaaacattcctaagtatttcagagagactaaaggagccaaaatgagacaattgtttgaatgttatatttgcctaagtctagtgcagagaaaattatggaagaaatcatctgtctctaagctttttacaacatatttttacaatgatccaattaaagttcacttctttgccaaaattcagcttatcggtcagagcatataaacttgttttcttcagcttctgagtcttcagcctaggtgcctgtcttttgaggatttaaaatgagaggccattgtgactgagcagttgtgtctttaaaacgaaataatttggaattcatgtgattcacctgggattcaaaattgcacagaggttcaataagtaaaatatgctagctgagatgattgattcagagatgcctggttacaaacatattgtatcatgggaaacacacacacatacgcaagcagggttacccagaaggaggatgattggacatctttgagaacaatgcctggtgcagtgagccagcaggcagaaatactggcttgcattggcttcacctccaaaagccaggtctcctaggcacaggcgatggcatgactccgggcttggatgcttgaaataaagctattgttggatgcggatgctcatttgaaaggggaatgcctcacaggaaaaagagccaattgcaagttggggctgttgccatggtgctttgctattccttcaacttgctatagatgaaataaatcctgggagtacaggggtagggtaacagaggggaaagatgaggagggaaatggggtgaacctggggcggggaatcccactgcagtaaagctctagtgtttccccttgcctgtgctttaacgctgacaaggagaagggaggggctgggaagaagggagagagaaacctgcagggaaggaatgactttctcaacatgccctggattgctaaaataaaataaaaattaatttaaatcctcagatttctaatgtgagttagaagatgtaacactaaatctcaaacaattcaccattctttcagtaaatgaatgttcatatttcctaacacactctggatcctagatggaaaggttaaaagagtttaatacatttgtcgaatgcaatctaatatgcatattaatgagctgatggagggcagaaacttacatgctgcataggaagtacttttcaaataaaataaattaattccattcccattcattttactatgaaaagaggctaaatgcactggcacacgcttggtgtgtgcgacaaataatcctccaaaaagctagttcacaaaaattcttgtgtactggcagcctagtctaaaaacagccatggtcctaaccttttttaaatgtttgcttaaatgttcagaaaatcgattaatcaaatgcatcatcactttgatcaattagagcggctggatttttgtgcagaggctgcatctgcagaattctggtctgcagtggagagagagggttaaggaacacctagttgaaatgggggagggtactgacttcagatttacttaaatattcatggggcttcctccattttaatcttctcctttttaaaagatggctgtgtttcctagtctggcaactcctcaggaaagaagaatttcttcttccttgcagagttcagctgagtaggactaatgtagaagagtggaaaccccttcggccaccagggctattcataattcataagtgcttcaaaccagccagctgaatacatttggacaggctcttgctccttcgtgcaattcctgatttcattactctcttctgccaggaaataagcagggagcataggcttcttgcaagaatggagtgcgaagatgggctttgtttggcttaggaaatgccatacattttggaggtttttgtcttttctaagttttgattattttatcactgaatctgcagggctttcctgatcctttcgggattgctctctcagaactgtgaattctttcaaagggatttgtggattgtggcaaggagagcattccaaaatgcctgaggcaaattatttgttatctgtatcttggggttacatcaaggtgggttaatttgattgtgttctgtgtctttgataaaatgtgaaacgtacctctgtgtgtttttttgtgaagtacaggacatctgtaataatttgatttgtgtgttcatttaacccactgggacctcttattttgaaataagagcatgttatattacattttatttaagtgtactatgctgtgttttaatcctgttctttttactgaattctgttttttaaaagatgcttctttttttttctttttcccttgaacttttcacatataatctcctctcaccaaataggttattaaattatattttagaggtaatttcagacaaatgtatttttaaaagtaggtacagtttcaagtggaattatcttgacctctattaaaattccttttcctatgtttgcatcttcaaaagtaatcagatgttaattctaagaaatcttaagaaaacctcttttccaaaagtgacgttggaataatttcaaattgaagagatatattttgtagaaacagtattatttatctaatggtatctgctcatccaacctcttgattcctggacagtaaagttggaaacatttaaaatgaacatttgctctttttaaagtggttaatgcatttttgttctttataaacagttcaaaagaatgctgaaccgggagctgacacacctctcagagatgagccgatcagggaaccaggtgtctgaatacatttcaaatactttcttaggtaagatattaactgggaaaaacctgttttataactggggttttcagaattaatttctacaacctatcaaggacatcctcatgtgaatttgggatggagttgagtcatagaaaaatccatttaaaataataactaaggccagtcttcaaaagaaaaaaaaataagcaggaagatcatgtttttgaaaaaaaagaattaaaatacccatccaagacagagggttattatgggctaattgtatttaaacggccctcagccccaccttgtctgcctgcctacttccatctttgctaagacctctgaagtaatgagggaaatccaatcacccaagccctagaggcagctccattagcttctctgacatggtagcctttcacttcctccaataactgagctttgagcaaaaggtttcctctatgatgttttgtaggggatatggttgaggaataattctatagtgatttggtccttgagaataagctttggaaataatttgactattgctttgctaagttatttattaaagaaaaatggatggtaagggggagaattttaatattatctgaaggatttcatcttctgcaagcagcctcgttctcttcccaatctgatgctttatctattattctctgttgttacattactggtatttaacacatgatttgctgaccaaaaagattgcatgaatggtcctcaactattgtcatgcgtgttatttgattatttgggatttttgaattcagtcttaaaggcacttttgtctaacgaacctatttggactattttgatttaagaagtcctacagaatctgcaaatctgtacatcaaagtaaatggatagcatttagattctgattttgttgactttatattgctactgaattacgcttgcttatgaaacctcactttccagggaagcgacccattctcacagctgaacactgcatcctctcttctttttggaatagccatatggcattaaatcaatgagcattttccttgatgccttactgaaacaaataccttttctggttttatttctaaaatcaatcctatttctctaacaccaaagcagttcttgctatcagcagatcaatcagccctctctttgagcagcctcatacagagcttactgcattactctgcagtggatggtcaccagacgtgattaacaagtgcctttctaacagtttctagtatgtgagtgtctgcagcacttgattttctccagctgcagttgcaacgcctttgtcagagaacaaaggagaagaattttcatccatcctagctcccagaggtgcctggaatctaactttacagaaagcattaaatactgatccttttcttctccttttatccatttgaagacagggatcttctgctgagcatttcagatataccctgctctgtgtaatgcccaacgatttttcattagctgggagctgttttagggacattttacaggttaatgactgtgggagaggagaataaaatcaaaactgcaagaacccatttttgtcttcataagcattgcattttaaaatacgagggcttgaagacttctcagaagagacactcactactggagttaaagttatatgaagtccctgagcccttaatcatccaagactggacctaagcagtcctcttcgtttgtagtctctttcaatatctgcttatcaaggacaacgagaatatcttagtctactaattaatcttttttatcaccatagtctaccaagaaagaaagctgataagataataaagatgattcattcctcagagtaggaaaaaataaaaagaaaaatttaaaaagatgctaaatatgagcgctgagtctcaacactgtctcaagatgaggcagatgtcaactttcttgcctattctgcttgctatttaggcatatctcttgagcaaaaccagtcatttgtcttctcattgttccaaaaattaaattcaagaacaaattgttgaggaaggttattagaatctcaatccttatagactcttagcattaagagggtggtgtgtgtcagtgggtgtatgtgtttgagggtggatgtggtaaaccccatcaaacagactagacgggcagattagaattttaaatgttcttgagaaaatataggaagaaaaaaacctgtaatattaacaaaagatgcatcagttgcctcacttgtaaaatgggaacactggtatagatgacatctcaaatcccttccaactctaacttactataactctgatatgaactgagtttatcagttttgctaagacatacctggccatctagattctctgtggtgaaccctaggcttgtaatctgacaatctcaaaaaacaaataaacgaagtttgtttccagactgccagtgaagggcatggaactcttagtcttatcctgtgagcatgatgaatgttcctggaagaccataaagccttcttcataaactttctgatctgcatgggaccataaaaccttgtagtccaattccctcattttataggagagaaaacaggggacccagagggatgaggtaacttgaccaagatcgcttggctaatactttcctcagccagaactaggacttggctttcttggcatctagacctaaataccctgtcaatcctttaacgaggaaagaaggctgttaggaacgcagaacatatagaagaaaatcacataaggactcttaactgatacatatatcattttggaaacaagtctttaggaatcaggattgttggagctaaaaataaaatgtttattaacaggccgggcgtggcagctcatgcctgtaatcccagcacgttcagaggccgagatgggcagatcacctgaggtcaggagttcgagaccagcctggtcaacatggtgaaaccctgtctctactaaaaatacaaaaatagctgggcatggtggtacatgcctgtggtcccagctactggggaggctgaggcaggagaatcacttgaatccaggagatggaggttgcagtgagccaagatcacaccattgcactccagcctgggcgagaagagcaaaactctgtctcaaaaaaaaaaaaaaaaaagtattaacagtttctaataatataaaaggttcctgtaagaccatggcaaccacctcagtgagcacaaaataagaagatcttagcaatttaccttaaacttgaagagcaatatttcaataaaagccattaaatgttaaaaatgtgtcatccagggaggagggaaatcccttaatccagagataggtgaaacttgtgtcattcctatcttttaaaaaaaagtggtgcaggaggacagggagaaaggcaggcagtagactatatttaccagtccaggcactcattgatgctgtcacataatgggctccaggttgctggtgcaaggggaaatagaagtgtctaatttcaagggaaacaaagcaggacctagggagaaggagaataaataatgcaagatttttacatgttatattacaatttagttaatattttcatgaacagagaaaagttatccttttaaatcctctacttaccctctcaaaacctagaacttagaattttcaagatgcaaggaaaagagcttaggaattttgcataattgaaaagtgtgatctagcaagacatgagcctcaaattatgccattaacagaatttggatgagactacttttttatccgctttttgtttgttttatacaggccaactgtttgctcactgtattctgactattccataaatgtaaattcactcagtgtttattgtgatttttttgagtctgagtttctgattatttccacactgtgctggctaagcatttaatagaggaaattcagaatagggaaacctattagttgttccaatgcctgcatagggaaacacccattaatgtcaaattggcactatttgtgaataatggtcttcttcattattgcagtgttccagacacagtagtggttcagctcaattactcactgttgcagggaatctttaattaaacaaagggaaaaggctgctggtcctactagaaatggttatatgtgcagtgacacaggagaatctaagagcctctttaaccggaggtgaagaatggtggtaaaaaggcaggccctatggtagcctttcattttagcaaaaagtagtagttattaggagtaaagtgacagggagaaaagtaatttcaaactaatataatatataggttttatgccagagattgtgtggcaggaaaaagatttttgacaggaacctcaaggcctgggttctatgctactaaatcactgtgtctggagcaaagtaattgcaaaataaatatctgttaaataaattgccctctgagcttgggcaagttgctgacttcatctgaaaaatgagagtgtgggattgttattggttcttaaacctggctctgattatccaagtcacttgggaatcttttaaaaaaaatactgattcagtaggattgggtggggcttattcagaaaaatctgtatttttctgaagtttcctgggtgcttctgatgctggactaggttggaaacccctaaactaattgagatgaccactaaaattccttcctaagcaaaagtcataggcttgtgagtgtaggagcttgtggacacctagagacaatactgatatgttagggatggataattcccttgcttcagtcccacagagagcaggtgaggtataccacgaagccagtactgtctcactgtgcttgctttgctctgatgaagtgtccacaggggcctatgagcagccagaggtctctggggaaaacatgtgactgtgccattatctgcaagagtcaaaacaaatcgtctagatcccagaatgccatctgggagcatgtcattttcaaatggcaaagttgtcttcctactaattttcactgtaaccagcggaggtaaatgtaggtacttttgaaagctgcattaactctttcagccacagggtgtcatttagttcaataaagtagtttttatgcaatttaataattgcctctgtgcacccaccagcatccctgtggcctgaaagagttaatgcatttttttcagaagtactgaagatacatctccctgtgaagtgaaatggaatatttgatggctgatatttttaatagcacaatgtaaaggaaagagcttctataagcaggtaggcactttttttttcactaatcctagctctgctgttaccttgttgtaacataattttaaaaaatattatgaagtatcataaatatttaataaccttaaacatgttaataagtgtaatgcttattacaaacaagaggccttattgttattatttattggtagaattaatagactccaggcatgaaataaaaccaaaattatagtcttcctctaaacctcaaatggtaataaaccaagcccttaaagtaattgtttgaggattatgaaccatttatatttctaacatatatactgcttatttaaactgagcccttgctaaagccatatggatttttaaattttttttaagtaaaaataagatgagcagatcatgaagcctgtttttattaatctgatggacattttattatacaaaaatatgttaatccctttatttaaaaatctacatataagtattagtgccccacattgcaaatgtataagtgtgtactccttatacactccttatatacccctaaattacactgaaaacagaagatttggtcttgggtcctatttttgctgctttctggacaagttacttcgttcctctgggccttaatttgcctagcaataacatggaacaacaaatcttatttttctcaacaaattttatattttccccacttactttatagaactgccctagagatacagtgaaatagtgctacaagattttattttataagattctaaagctgttatagatggttagagttgttttgaatattgcagtggattctcatagacacatgtgctgaaaaacatattcctttgtctgttgcagacaagcagaatgatgtggagatcccatctcctacccagaaagacagggagaaaaagaaaaagcagcagctcatgacccagataagtggagtgaagaaattaatgcatagttcaagcctaaacaatacaagcatctcacgctttggagtcaacactgaaaatgaagatcacctggccaaggtgtgtataagctcaggttttgtgcatgtagctctctgctttacagcagacggatgaccgtataccttttagaaaatagtatggattgcttttgcattattattacattttgtgttagggaagctcatatgaaatgactttactgtgagcagtaaggccttctgaaagctgtcatttgaggaaggttgattgaacatgagaccaagtcttgggggatagcctggatctcttatgctgggtagccattaagaatgccattgttggggcatctgatggaagatcctttttccataccaaagaaccacttttttttgttttgtcctgagttaggtttttatggacagttcattatgaatgaagaatccttctgaagagacatggggaaaatccaaggaaaggtcaataggcaggtctgaattatcccagaggacatttcagggactgtatgccaaggaccaatgggaaaatctgcactaatctgtagtgctggaaaagaaataaagagaaactgacagcactgactctggagcccaaactccagtagtggagggaggcatagaaagaattcatacatcctttaggaggccacacaaagtgactgctgaggtcctctcagccttgtgagaatatgaaatgagcttactgtgagcagtaagaccttctgaaagctgtcattagaggaaggttgattaaacattaggccaagtcgtggtggagagcctggatctcttactctggatagttactaagaatgaaataaattggtccttaaatcagataaccttggaataatctcacaacacaggcctgagtgatgtttcttccaggtccgtctgtggcccaggagccctaggatgtaattcatgactggcattcttcatgaccttttacattcaattgggttgacttatgcacattctgatagctgagtcttcctgatctggccttcagtgatgataaccaaagggcagaggagttttccctgagactgttttccagctgtcactaatgggccagtaagcagcaaggggagagacagggacattgaactagagtgatctctattcacttgtggccacctttgaaagcaacattggttgaagactgatgcatgtccaatataggtcagcaactaaatttataaatagatactttcccttttcagaataaaaaatgttcagaaacttgtagctatcatgaagaggacacccgacctcctaggtcatttaactttcagattttcacacaactaaagcactctaaggagacactctaaagacttaaacagccaatgtccaaaaaataaattaaaaaaatgaggcatgttagcacaactttccttattcctaaattcctttaaatttttaattataggagctggaagacctgaacaaatggggtcttaacatctttaatgtggctggatattctcacaatagacccctaacatgcatcatgtatgctatattccaggtgagtgaacaggagtgaatactggctttccaattggatggctctttatgattttttttttccatcttacttttctgatttaactttcctcgacttttggacatctacttatttatgttctaatccattttacaacacaggaaagagacctcctaaagacattcagaatctcatctgacacatttataacctacatgatgactttagaagaccattaccattctgacgtggcatatcacaacagcctgcacgctgctgatgtagcccagtcgacccatgttctcctttctacaccagcattagacgtgagtaattatgacctgttttgcattcctgcccatcctccttcaaaaatgccatatcagctggatgtagtagcatgtgcctgtagtcctagctactcgggaggctgagttgggaggattgcttgagcccaggggttcaaggttacagtgagctatgattgctcccctggactcccgcttgggcaaccctgtctctaaaaaaataaaaataaaaaaaatttaaaaagtgccttacaatatacaatatacttacaaaattaatgtaattagaccaccctgcatacttgaacaggttctttataaaatgtatcacatccattaactgagctatttataaaaaatgaatgacatttctacttgttttgctttctaatatcagagtaaccttccctttacatctcttactattaaaagtatttaactgtaaagcaattaacagaatttcagggcaggaatcatgtcttattcttcattgtatttctactaagggatgcagtgtatctcaaaatatcttgttcagtgtccggtaaatagtatattctcaatatgcaattacttatctgaactgcccaatgccaccctaggtatatatagagcactatattccaagggggatatcacagaaatataaaatactctctatatttcttattagtaataagcatccagaggcttagtctcctaaaaaattataaaactgatgcaatgtgttgaagaagtagtaactaaaaatctagaacagaagaattaatgatgctgaaacaaggagaaacaatattcatatttgccataccaactctgagaaggtggccgtggctcccttccttcatagattaatgcatttgtgtataccgatatcatcaacaatgtgtacagcaggtcatactcttacttgacaaatgaaaatgatggtcaagtactcccaaaatgtgctggaccactgcaggaagagactggccatgccctgtccagcctcacctttacagattcagtttggaaggtgaaaaaagattggccacaacttttttgtggcaactctattgcttgtgttgcatattttctaagaaaagaaatccaagaaatcttgagaaagtgagatggagctaagggtgtttgatccctctgaaggagagaaagagtactgtttttataccctgtgtaagtatcatagagtgaggcaacactatctatcaactgctcactgttattaatagtatacctgctgtgtggccagaaattgacaatgatgagtgctgcaaactttttagaaaagggagagctcaatgagtgcttgggtaatgtgattggtctttataggagaggtggaaacccacctcaagctggcatttgaaggaccagaagatttaactaatcacagaggatgaggaaagacatttcagctctagaatgagcaccagtatataccttattaatactaggtttgaatcattgtgcatgggtgggggcagagaagcattcatgacatgacatgaaggaattcagcagtggggcctcaggtttcacttcttagaaaggttctcaaatcttcccctagtaagtgattagtgggtacgtactgaatgaatgaataatatctgaaagcttgtgaccacaccataaatttagctttgggaaataatttattgcttatcttatgaatcgggagtttggccatttttctctaagttattcagctaagagtatatgaaggttgttatgtctcagagcagagccagtctgacttgcttctttgacttgtatctgcttgtgttacataagcaccatgctgccacatcactggtccaagaaacaaacattagacgtttacacactccatgagatttgtgctaatatctttccaagcatcagcctttaggcttgatgtgagattgagctctggccatcatccctttcacatcagagactttatgatgatgaacagaatctacatttacttaaattagtatattgagatattacataaatcaacaatccctctcccaacaagaataaagtaggatactttacaaatgaaactgaataagcaggataggcgaattggatgtgtagttaaatgtgtttatttgcccgacaggctgtcttcacagatttggagatcctggctgccatttttgcagctgccatccatgacgttgatcatcctggagtctccaatcagtttctcatcaacacaagtgagttcaccactacagcagtcattccagataattgtatgattcactgcttaatttttttcctcctaatgttttcattatggataatcacaaggataataatgaggcaatccttccatttctctcaaactggtcaggcctttcgtggatactcagtccaatctggcaacacaatgtttgagctgcatggagaacttggagagggtcataggggagccataaaaagtactcaaaatttggcaaatacaatatgtaaggaaagaataatagatatggaattattcataaagaacaataaaaggtttggggatcccatgataatgactttttatattatgcaaaactctcgcacagagcatagtaactcactactgtccctatctgcttgggaagcagccacaaatgttgaatctgcacatgggaacctccaggtaaaaataagatgccataaaaagcactggaatgagtttccacagttcagaaggaagggtcattaaaagttccatacattttcttccaactgcatagatttgattatggattgggagtagcaatgacctgagtgaccaggggtggtctagccttaggattccaagccatactcaaagcttttgtcatgcttaaaatgtttagttttcatacctttgaaaatccattcattttctcaaataatgtactatctctaagtgctggaaatctaagtactttgagaatattggttattgtagtcatgaataacatcaagtactgacagttttctagaaatgctttttgagctacttgctgtaaaagagtcctgatcatcagtccttgacctttatccaaagaatatctgaatgacctaggtttggagtacactgggtccttttacttcattcttctgttgaacaaacaaaatgttggggcagctacatgtctgcatggattgtatcagttggtagaatgtggtgtcatgaatcatatataggccagttagcctcacacagaaaaatggtctatctaccacagtcacctatagcactgcaacatataaagcctgcttgtagatctgtggccttgatcacaggatgaacaaaacaagagtactcattggaggttgtaactaagagcacactgttaaagcaatgatatatgtgtaacagaacctgtaattaagtaacacattaccaccacttgtctggtattcttgattaagagaaaatgtggtttcataagtctgatgaccatattctcaagcagacttctgtctaacaaaagatgcctgtgattcttctatataaaaggcaggctggaagctgcagcttaggtttccagatattgcaatttctggtggagagagccaaaagacagaaaatttgacatcagaattgttcccaaaaagtagtaatgtttagtatcatattaatagaaagctctaaaaagtgacagtatttgggtaaaatgaagttttacatcaagcattatctttaaccatccaaaattcacaattgccggagattagggagaatgtaaaatgtgaatatagcttgaaagtctcaatacaattcataaagtttagtggtactttcatgttgttcttttccaaagtacaaaatttttgaagatacataaaaataggatttagctgctcaggaatgcccttacctaatattaaattcttcatctgagatatagaaggagtaaaaggattttaaaatacaatgaattttaatcacagggaaagcttatacaccagtagaagcattttttgcttagaaactgatgacttctgtttgtagagggccactgcttctctaagaggaaatgacatgtagctggtggttcttgaaataatttggagagaactaggtctgatttcactttgagataatgccaacattcaaatcatatccctttttaattaagtcatcatttggtctgatttattagattcagaacttgctttgatgtataatgatgaatctgtgttggaaaatcatcaccttgctgtgggtttcaaactgctgcaagaagaacactgtgacatcttcatgaatctcaccaagaagcagcgtcagacactcaggaagatggttattgacatggtaagactttagcctctctacattcctcacttactgccattctctctgatagactgaatttattaagagttttcattttctttttacccaaggtgttagcaactgatatgtctaaacatatgagcctgctggcagacctgaagacaatggtagaaacgaagaaagttacaagttcaggcgttcttctcctagacaactataccgatcgcattcaggtatttgaggaaagtctttgatttaacacaaaaccaaaccaaactaagctgaacaacaattagaaaaagaaaacaaagataaattcagttattggtatatcctaggctactcctatagcttagggcttattttaagaacaagctaaggaaaatggacattcaagtttatcttctaatttatgaggaaaaataatctctatttgtggaactgcttattagttatataaataaatcgcaaaatctatttgtaatagggcatacgtgactgttggttccaaaagcttgtgtttggatttaaatcccattgacttgaagtttgttaggtctgttttggatatacaaattgccatcagctgttctcctctttccacaagtggaaaatatgaagttatctactttgagtaattctttgcattctttccaaactgagaaaaggaaatgatagcagcatctgacctctaatgttccttccaatttttaaattcaatgactgtcggtctaagaagacacacgttttcccctttgggactctataaaagtaaataactgacccaggctagcatcattgtaattccattttttttcggtgcatatgtcataattataatgcaactaaaatgttctcgggtttagtaccaagcgtactagtatgagaggcatgagatgttccggcagtatttacacctaattttatgagatttccaaaacttgatgatttcaggtccttcgcaacatggtacactgtgcagacctgagcaaccccaccaagtccttggaattgtatcggcaatggacagaccgcatcatggaggaatttttccagcagggagacaaagagcgggagaggggaatggaaattagcccaatgtgtgataaacacacagcttctgtggaaaaatcccaggtatctaatatgagattttcaaagtttttgtgagctctgctgattatagagctggagggttctatttaattccgtttttccaatagaatatgtatatatgaaacaataaggagacaactacgcattttgttccattatagtcaggactcatgcgacttctccattacactcagtttcacagggtggggaaaagtagtcatcagaaacccatcaaaatttggactatgtgtccctaaatcatttagatagttgtctctgatgttagcaaatccagctgaataatatgaacatcagtgtctcctccatcccaaccctctggatttctcctagctctgtcttcattcaagaactctactcctcatccttgcttccagccctctgtttttatcttctgtccttaatcaagcccacggtgaccatcaccagaggcagtctcttttactgcatagtcaaagccctgtcttgtcttccctcccaaggatgcttctatgcttttgagaacatgctgacattttctggttgtgtccaaagcaacacattctgtgtgtgctcaggacaggggacaatagtctggaggggtgaatacagaaatgtccagatgccaatagctgcagaatatgcagcaatggaaagtatcagtatccatacaaagatttttcaagaaaacgaatgggctgagccaagtagctgagattgagaatgagttcatagactgtccaagatctttatcccaaaaacatttggattgtttattttcagtatttatcctctttccctactacctggatactccaaatttgcatatacttgtaatattaatatacagttcctttgcaatatttattttgttgcttcttagagaaacccaactaaatgagtttaaaaaatctgtgaaagggctgggcacagtggctcatgcctgtaatccagcactttgggaggctgaggtggacggatcacctgaggtcaggagttcaaaaccagcctggccaacatggtgaaaccctgtctctaccaaaaacacacaaaaaattggtcgagcatggtagtgtgtgcctgtagtcccagctactcgggaagctgagacaggaaaattgcttgaacccaggaggcggacgttgcagtgagctgagattgtgccactgcattccagcctgggcaacagagcaagactctatctcaaaaaaaaaaaaaaaaaaaaaaaaaaaagaaagaaatctgtgaaagtgctctgaagtctaatatactgtaaaaatgcaagttaacattgttaatgagggttaattcgaatagcccaaaggcttaagtggaacaagatatgaatcagtaaggaggaataacacccttttattaatagcagtgatgttttatgtttatatgatgttctgtggagcatttcacacattttccatacattatcttacttggatccccaaacagccttgcaagatagataaagtagatatttccccagcatgtcaggtgcaaagctgtcctcttggtccactacagcagctctctcatccaaagctcttcactctccatcttagggacaggtcttcctgttgccatgacatcgttatccactctggtatttcccaccaatgggctctgctgaacactgtctgattggcccagcagtaaagctctttactgggtgctctcaggattcatacagctctctcgtcctgtgatctagggaataaataactagcagctacctttcaaaaacattctcagcatttcttagcagaagcaaaacaagcgaagaaaggaaatgactgcactgtgttcagcttattcaattttctccattaccttgagcttgttattttgggtccctggaaaacaccttgaaaatagtctctaacattcattaagcacacataaagaagtaaaagggagggaaaaggagtgggtggaagtgagagaaatatctgaatcatgtacggttgagtttttgtaaccagtatagatcagagattccctgactttgctgtgaaacttcctttttaaggctaggaaagcaccagaaagaagaagaataagaaaatatatatatatcatacatatatatatacacacatcatacatatatatatatatatatacacacacatcatactatatatatatatatatatatatatatatatatatatataattttatttatgaaagaatcacatatgaccaaagttcttgtgtacagtacaacttggatgtattaaatgactggccaattaccaacatgttaataaaggaaagtttccagtagtgtggaaagagacctatataatgtcccatgggtgggtgccctttgaccatctacccctaaatcccaatgcagcatctctgtagctccccagaccatggcaggggaattcccttccctcattcaactagtgcctgttctttctctctacttgtccccacccccagtgtttcctgtttgtccaacaatgaggaggccagcgtaaggccacactgctagctcatgcaggatgcatagcccctgagtaaaccataacagagccataagcctggtatttaatcacaggaacatcagcaaaaggaactgcttaattgttttttattttcccttctttcacctgttggaaatgactgcgtgctctgtagatccaaaacaattgcatggatgtccaccgaggggatatgtgtttctttcagggctcaaagtattttcacgtgtttcatcaaactcctctaccagccaaaagcattccacagaacttgagaaattccagagtagtcaggagccagctcctcatcactttggaatagcaacatattttaaagttaacaaggaaaaaatattgagtcaaaacacgttagacctgggcctgccttcttcagaaaatgactcacagaatccaagtagtggcaaagtcattctttgtctttgggtccctggaaatcatgaggattccatccagacttcttatctggcgcacataaaaggaaatgcagtctgttgtagcaagatgaacacgggctttggaatcagatgaagctgggactgagtcccagctccaccagtcactagttatgtgacctctgacaagatatttaatctcaataagtcgtagtttctgcctttgtaaatagtaaacagcaatacttaccttccaggattaagagagaatacatcgattgcattcagtgtaagacccactgtattgtgagtgcccaaatcatggaatccattatgattgatctttctgaagttattaatgttctttctttgcatggaaaccaggaaaccttgtttacttttcaagcaccatcacaataacagatgtgtcatcttatttttctccaggttggtttcatcgactacattgtccatccattgtgggagacatgggcagatttggtacagcctgatgctcaggacattctcgataccttagaagataacaggaactggtatcagagcatgatacctcaaagtccctcaccaccactggacgagcagaacagggactgccagggtctgatggagaagtttcagtttgaactgactctcgatgaggaagattctgaaggacctgagaaggagggagagggacacagctatttcagcagcacaaagacgctttgtgtgattgatccagaaaacagagattccctgggagagactgacatagacattgcaacagaagacaagtcccccgtggatacataatccccctctccctgtggagatgaacattctatccttgatgagcatgccagctatgtggtagggccagcccaccatgggggccaagacctgcacaggacaagggccacctggcctttcagttacttgagtttggagtcagaaagcaagaccaggaagcaaatagcagctcaggaaatcccacggttgacttgccttgatggcaagcttggtggagagggctgaagctgttgctgggggccgattctgatcaagacacatggcttgaaaatggaagacacaaaactgagagatcattctgcactaagtttcgggaacttatccccgacagtgactgaactcactgactaataacttcatttatgaatcttctcacttgtccctttgtctgccaacctgtgtgccttttttgtaaaacattttcatgtctttaaaatgcctgttgaatacctggagtttagtatcaacttctacacagataagctttcaaagttgacaaacttttttgactctttctggaaaagggaaagaaaatagtcttccttctttcttgggcaatatccttcactttactacagttacttttgcaaacagacagaaaggatacacttctaaccacattttacttccttcccctgttgtccagtccaactccacagtcactcttaaaacttctctctgtttgcctgcctccaacagtacttttaactttttgctgtaaacagaataaaattgaacaaattagggggtagaaaggagcagtggtgtcgttcaccgtgagagtctgcatagaactcagcagtgtgccctgctgtgtcttggaccctgccccccacaggagttgtacagtccctggccctgttccctacctcctctcttcaccccgttaggctgttttcaatgtaatgctgccgtccttctcttgcactgccttctgcgctaacacctccattcctgtttataaccgtgtatttattacttaatgtatataatgtaatgttttgtaagttattaatttatatatctaacattgcctgccaatggtggtgttaaatttgtgtagaaaactctgcctaagagttacgactttttcttgtaatgttttgtattgtgtattatataacccaaacgtcacttagtagagacatatggcccccttggcagagaggacaggggtgggcttttgttcaaagggtctgccctttccctgcctgagttgctacttctgcacaacccctttatgaaccagttttggaaacaatattctcacattagatactaaatggtttatactgagcttttacttttgtatagcttgataggggcagggggcaatgggatgtagtttttacccaggttctatccaaatctatgtgggcatgagttgggttataactggatcctactatcattgtggctttggttcaaaaggaaacactacatttgctcacagatgattcttctgaatgctcccgaactactgactttgaagaggtagcctcctgcctgccattaagcaggaatgtcatgttccagttcattacaaaagaaaacaataaaacaatgtgaatttttataataaaatgtgaactgatgtagcaaattacgcaaatgtgaagcctcttctgataacacttgttaggcctcttactgatgtcagtttcagtttgtaaaatatgtttcatgctttcagttcagcattgtgactcagtaattacagaaaatggcacaaatgtgcatgaccaatgtatgtctatgaacactgcattgtttcaggtggacattttatcattttcaaatgtttctcacaatgtatgttatagtattattattatatattgtgttcaaatgcattctaaagagacttttatatgaggtgaataaagaaaagcatgattagattagtctgtaggcccacttatttcacaattagttctgacatatgaaaagcagatctttctcttctcttgtgccattccccacaaagaaagccaaccactgtgtccagccaacatcacaactgaagtttcagaatctatgtccaaaaagtcccctagtttggaacatttcgcttttttcttagcaactgttcacccagctcaatgatgcaggaagggggttgaggaaggaaaacaaaacaaaaccactttgctcatctcgaactatttccttctacctctttaagagtctgaagagtttaatctactagataaataagggaatccccaacttggctgagtcctctagaaaagtgaatcatagattatagaacattagtataatgcagtcagagagtcccattgattcatttgacacatgaagaatctgaggtccaaagagtcatcttaaaccacaacccacagagcatgggtggacactcagggttttctcagtgatccatgcagcctcttgttggtcatatggctaggattttctttctggaaagaactttttatatataagaaaaatacttaatgctttgttgaaatcttaaagtcagcattttaaaatattttatcctgagaagagtgtgtgtgtgtgtgtgtgtgtgtgtgtgtttatgtgtgtgtttgttgcagaaggttgcaaacaagaatcggtgttggcccataataatttagccacaagggagtgctctgtgaaccagtaagatggtcttctctaaacacagctgaaattaagatgagccgacatttcagaaccagcttgcctgctagttgcagagctatttccaacattttccatcatctctgatatctgattgtgcctcaccatctctgagagtttgaaaaggagcaaaataaattgcttacaatagccagaggtgtgagttttacaatgcccagagctagaaatatttgcaggtttgttttctactgagaagaggttcttaattaacccttattgcaaataagaatcatgtgggaaatacatatatttaaaaacacttgtttggggcccatcctcctcccagatttctgattgaattgatcttgggcaaagccctgggcatcagattttaaaaatttcccccaggctggagtgcactgacatgatctcggctcactgcaacctctacttcccagattcaagcaattcttgtgcctcagcctcccatatagctgggactacaggtgcatgccaccacacctggctaattttttgtatcttagtagagatggggtttcaccatgttgcccgggctggtctcgaactcctgagctcaggcaatctgcccacttcagcctcccaaagtgctaggattataggcacaaggcactgcacccagtctctccctaggtaatcttaacgtgcaattggagtagagatccaccgctccaaaacagagaatcatgcctgcagctgaggtgttctttcacccccactgtcttcagatattcatt

SEQ ID NO: 461 - DNA, 1522059 bp, Homo sapiens
  source 1..1522059: mol_type = genomic DNA
agcctgatctcattggagagcaaaagaaggaaggagagagaagaaggagaatatgttgagaattaggaaaagaagagaactgcttttttttgtagtaatttcagtaggtatgtcttagtctccttagacttctataagaaaataccataaagtgggtggcttataaacaacacacttacttctcacagtctagaggctgggaagtccaacatcaaggttctggcagatttggtgcctggtgaggacctgctttcattttcacagatggcaccttctagctgagtcctcacatggtggccaggttgaacaaggtcccttgggcctcttttataagggcgctgatcccattcatgaggactctgccttcataacctaattatctcccaaagggcccccatctcctaatagcatcacctaggggttagcatttcaacacagacattcagaccacagcaaggtgtaataaaacaccagaaggataggctcttttgatgcacacactgtgtggaagcagggccccaaaccagcatatattcctggtacaccacatgtgaccaggaagctaatagctgagggactgtaaggaacctctgctggaacaacacagaggcctgatactcagattatattggagataagataaattttatgttgggagagagaggagctgtggcagtaatgagagatgggaatttccaatagtgtgattggctggagccccgagtccagattaattgatttaaaggaaataaagtagtatttcctatgtgtacaaattcaagatttatacccatagcactgagtttgacctagagtatttggagctctcggagtagctgggtgggatgcaggacccaaatcagaaggatgggaaagccctggtatgattcccctgacacaaggttgttttccccttggtagacaggtggtactctctagcaacagggaatgtttttggttttggtttgttttttggtggaatgttgctgttgtgggtccaaagccgtgtgcctgaggaaaggtttccaggtcagagattttaatgtgagttcaggcccaccaccacccaaattagcctaaatcagcaagcgtggcaagtcaggaaaagaagggagttgcttccttagttccatagtgtcactttggggtcatggctttggggaagggagcttgagtttaaaacagttattcccaggaaggcacaaatttggcacctgttggctgtcaggactgttgtggcaggagaaatggtggagaggctaagcatagatgctctgtttaattacccttattctgctggcatggtctggggatgatctggggattaaatttgtgctgatttctttactctcattatcatgacaaatggattgtcatttagaaaaaagtagaatttgtgaggaataagcaaacagagtttttagttagcaaagagataggaaactctaaactctttatccaggatcttagtaagctcaaaaacaaaaaacaaacaaagtttttatggtatcaagttaaaaactctttaatatctcaaaatatcttatcagattgaattatatccaatatcaatttgatggctatattcaacacatattaagaacctactgtgtaccaggcatagttttaagtgctagtgatatattggtaagcaaagaccttgctctcatggagctgtggtctggtgggagagacagataacaaaaacaaacacgtatataaatctgtgagaagtgttataaagaaaattgagcagggttatgagaataaagctacagaatgggggatatctcacacaggatggttagcaatggctctgcggctccaggccctgcctactctctcacttttcctcagtttctccagatgtctcaagctcatttatgcctcaagatctttgcaaatgtttcttgtctggatccccttcctcttcctgtcaactttttccctagttacctcttacaatccttcagaactcagatgcaaatcactttctcaaggcctcaaggaagccttctgtggccctccggaacagatcaagttcaggttcctgcttatttaccccactgagctccttcattgtactgatcacatatataattatatgagtattgtttaagcctttgtcccctccagactgtaagctccatgaaagcaaacactgtgtctcattaacttattgttgagtccttaaaactttgtagtttgcggagtaggtaaccaaaaataattgtcaagtatctgaataattttcaatatcccagaatattcaattaagtaagtatggaaggcccctttcaaagcttgcttagaaaacaccatgcttaatcttataggccatctaagtaattttggtaatttttaatgtagcaaaattactcaagttggctttatttggttatgaatatcagtactaacttatgatgtcactatcctttcatttcaaccacgttcagtatcctaagagacatgctgattgaactataatttaaaatgaataatcttttatttgtaaaagattgagtcataaataggcagaatcaacccatgcttttattttcattgcatataaaaatttcatatgaaggtattgatgtacagtactatccccgtgggctgtaagagaggctaagaaaccactaaaagaataatcatttgtaattctcacacacaatttaccactctgaaaatatatccaaagaaataaaaacaactcaaatcagttaaggatgtttttgtaattatagtgtcccctttgtactgtttaaaacaaaagtaatcaaattcctttgggccagggctgctaaaatctacagtttgtgtcaaaaaataaaataaaataaaataaaataggctcatttttcctagaaaaagaatctttcctttcactgaaaagccacatgattcaagggctgggcaagtactgggaggatgtttccatataatccattataaatgtttcctgctttaggggctggccattgtacaaggtgaaattttaaaattctaaagcaatgaaagttttgcagaaacaaatcttagaggatagtgaatgctttctgctatgtaaactgacatcaacccacctttgcgtttaaatagatgggtttacatatatgtaaggacatttggtttatcttagtggaagaaaaattttaggattaaaaaacagtattttctctttaatgtattctcttaacatgtcaggaagctgatgaatagataaccaacacgagtaaactctggctccaatttcaaatcaagtccattttcctatgagctctagaagccaaaaggacttaaaaaaaagaaaaagattgtttataatcactgggaaagaatatatttccccagttgtgtttccgagttaaaaaaaaaaaaaaaggaaataatcaaatgcaagtagctgaagtagttcctgatcaacagatggcaaacaaccatcacacatgcagtgctgctccctggcaagaagtacttaagagcttctgtctcaaaagggtctcagaatctttcagaggttgtctgtggttttgtaaaatccacctattggcagaattctaatcaattaaaagcctggatgtaaaatgcccagccctagctccactgttacctttcaaatgcagcaaaacagaagaaaatattggttaaagttaaggcacagccctgggaccaaagacctgcagctatgtttttttaaatttatatatctttaagtattttatagttttcttgaatcttccataaacaagctctaaggtgacaagactatattacaggagaaaagaaaaatgtacagagtatgtatacacaccattcattctctcaccaagagtttccaaatatatcaacaccatcccatcatgggatgatgttttaataagaacagataatttacaattaacattacagtatgtacattgcaataaatacatggttgtaaacagacaaacaagactgtattacaggtaaggtcatttggtgagaaaaaaaatgcatggcacaaaaaataaataatgcattcaaaaattatcataaagctttctgtaaaatccatttcattcaagttttttctttccttgtctgtaatttgttctatctacattattgtgaattttaactgatataaaacaaaattaaaacagcattattgtgttcagtaacttgcaagctgaaatgcactggttttacacaaacttggacatttttttccccatacagtacccagatattgcattttcttatggcattttaggaaatgtaaagccacttgtaaaaggatattcttttattcttttttaaagcagtatatatttctgaagcacactttggcaagagagaagggcaaggataagcagattgtacagtgcattagtccctgtctcttggatattgagccttttctgcaatttgattgtccattagtgggtatctttacaacacggtaccattaaaaaccaacaaactggaagaaaaaaaaagagcctctctttattagtgcagttataaaccctttaccctttcaggtctggatttgttaatgacatattgctgctttttattttattcattattaagattctaggcactctgtgggggaaatactaagtgtagggaggagaggaatgagaatgttttggaaagaggaataaactctagactctttacctttctttctagacttcactcagggacaaataaaattaaaagaaacaagttcccaaatattcttgtgaaactacttggtcaaacatacgtctttatttttttcttatttgaaagattaccatctgatctttacagaggaaacagagtagaaaccttgcaattaactagttgattcctcttctgctttatgtaaaagatcagagttataaagacataatttttatttcaaaggatctaagcatcagctagatctcaggggactgaaatggggactctcttcagcatgagtcatttgcctggctgatgacttactttccagtccccaggaggctccttgagaagttccacatataaatgcttttcagagttgtaattcttcttaaacgtttgattttccacttgtcagatacccactttggcttctatctatctcaattcttgaatatcaatgtgaaaaatgattatttgggctttaaagtcttcatagagaaggtaaagaagactttattaaggctgacgtggggataaagtcagaattaaatgccccatgatgccaactgctataatcaggtaaacactaggaattaatctctaaaactgtaatacagttcctggtgctgaaatcagccaagagtgatctctaattttttatttaaccagaatttttaccaatataataaatattttaggatgcatcacagtactaaccctctggtgccagtggcatcatcttctttccctccatgtgtttaaagaagtagttcccctctgcaagatatgcttatggatcgaggataagtgataaaggacttcctacacgttatgtggctgtccattaaggaagagtagttgctacacttaaaaccgtttctcagggatgttcctgatatagttcttaatcccatggtgaaatcattaaaaccaaataggattagttgtattggtgtttgttaatatattgttaatattcttaaaaactgcctagttggctgtttaacttttctctgtaaaccaagagtaaaagctagtcatgatatacaacctcgtggttgaaatgaatgttaaccctaacttaactacctgtttcttttcaccggtgacaatggtagtgatatatttgacaagacctcatctagcaaacatggataaggttcagacacacgctaaattataaagcagcacaaggggaaaaacctttttcttactataactggctgtaaaaacaataaaaatgagcatgaaatgtgtggattattagagcatgaaatgtgtggattattagaaagacatgcacttgtgaaatgaacatctagtgacacagcaaaacgttattaggagatactaagtaggaaaacatctaaaaaagactgaccattttagctactgggtatttatatatctcccacttgcttcagacaacacgaactgatgactgagtttgcatgaagcttaagacacatttgatataacacacataaaagtattatagaacaaatagtcactttgcacatgaagaaaaacactggtgaagagcaactctgcttatctggaaagagtgaaacaaaatgcaaagtaaataataaagacttacaaaaagggtttcctgcaacataaagttgtttttctcttttaaaatatggaagtcattggtatataaaacaaacaatgaatcactacaaatcagttaattgctatgaactataaggtgcaagtaaaattcataaattagatttttatccagtgtagcacagatttgtactgaaaacttgcaagttactccttagaaaaaaataaccagtggcagatgaagttctgaacatagttttttttaaatataatacctcaatacatttaataataaaagtaagctctacaaaaaatctgttttacatatcatacaaaatgtagaggtcagtgcagctcactgaaccacactattcagtcatgtatcaggaagacttgaaattagaaaattatgcaatttctgtggctcatcctcctcctactggtaacagattcgtgctatgtcctgttcttgacatatttgttgcttcgtccattaagttcactctgtgcaatgcctttcttctgaaaatattgcaaacaaataaaaaggaatagaaaccccaagtccaataaacttttgggctgcctgatgagtcacactctcttgaaaataatttggagtagattttatctgctttgtcagctctaccaagctgaaatcttgttaaaaacgctgttcgtgaagatgtccaccttgctcggatgacatggaggtgaaaaaactggttacgatattcctgagcgctggactgagtagtcaaggtcagttttgttcaacaaacgtcctggcagatgacagtgaggtgtgaccgtggttgtggcatgtgacatgcactttggaaacaatttttctacttaaaaaaaaaaaaggcatgaaagtttttgcactgttacgtgtcaggagaacgatcatctatgacacaggcttcaggctggctttcctcttcttcccctactgcctcctcttcaacctgttcatcaaggggaatttcagtagactctgagtcttgagtacaaagagtcttggagtcactgcagctagtgtcttcttccacttgactgccactgtccttttccgtgtctgactcaccatcttcctctaaagttagttcaaactggaatttctcagtttgaccctgccggccctcctctgggtcatcaggtgcaggagaggggctctgagggattgtgctctggtaccattcacgattgtcctccaaagtgtccaaaatatcctgggcgtcagggtggacgaggtctgcccatgtctcccagaggggatgaacaatatagtctatgaagcccacctagttaagaaaaaaatccagtatgagtagaggacttgggactaagaaacaatggaaaagcttaattagatcatggcccacaaataaaacactgaacagaagactactaaacttagtttggtaaaattgtcactattttcaacaacaacagaccatttaaagtaaagtattgctactagctggtcaaaattagcttctagaacctttggttaaagagcatgttctatagcataaaaaattttccagttgttgacatggtagggcttattttacaatcaccaatttgtaggtgaatccagataactgaaataatgccatgtgctctatgtatatgaatatattaaatgaatatagtcataataaatgaatatgtctttagaatatatatatgactatatgaatgtaagtcataagaatgaaagttctttggatcataaatactaaggtgaaattgagcttgtcaaaaacaaagtaattttaaaaatccagtaaaatactatcatatgtaatacaaagtaaccaaatgctaaagcggtagctctgttctctctgaaagctatacacttcatgcattacctgtgatttttccacggaagcattgtgcttgtcacacatggggcttatctccatgccacgttccctctctcggtctccttggcggaagaactcctccattatccggtccgtccactggcggtacagctggagaggctttgttgggttgctcagatctgcacagtgcaccatattctgaagaacctaaaatagatggatgcattctctattcactcctgttccttttttttaaaaaaaaaaacaaaaaaaactagaaattcacattggatgactgcaacacttaaaaatacacgtagtgtaagatttattccaaacagctcaaccatgatgtgtctgtgtatagttcacacttgtattaatagttccaaattatgccacttctactgcatctaaatagcttaagagaaactgtttatgtgcatggctgactagattcagagctgcttaagtggctggttctgtggggtgtttgtttgttagtttttttaattaatgtagatgcaaacagaaagaccagtagaattttacctggttaattctcaggaataaaaatttggataaaaatcctgcctacaattgctgaaagtataaggtgggagaaggaagaaatacatcttatcaaagctgaacacgcagacatgtgcacatgtgcacagacacacacacacagagcaaactcaaacaaggctttacctgaatcctatcggaataattatcaagaagaagaactccagagcttgtcactttcttagtttcaaccatagtcttcaaatcagccagtagattcatgtgttttgacatatctgttgcaagtaccttaaaatatagagtatattattaagttcagagaaaacagaatttacacatgaaaatattacgcagaatataagaatgaaaaaggaataaaacaacactatgccttttaatgacagtggaaaatccttactactccttgggggcagagtcttttcccctttgctatcaagttttcccaaagcccagataaatgtgtgtaatatacagaaatgctaggcactgacaaccactttcatggtgaaaaatgggtgacatctccatggataagacatcatcacaagtttataagtttttgaaagctagagattttcctgtgtctcataatcactgaataagatgcatagaaaaaagagtaaagtcatggatgtctaaatggcactgtctactgatgagaaaaggtggggaaaaaatccatttgagctgtggcccacacaatctgcttttgttagtcatttttctctgcccgccaccagactggaggggcccagaaaataaatgatgagggtgagctgacattattctcaagtccaaactgctagaagtgaaaaacctattacagaacatcacagccagcatcacgggcagcttctataacataaagggccataatatgttttgaaatgcagttccttttacctaatactcatcttgttcttatgtctaaattataaacaacttgcatcacagttctcttctttggcttttatcagctacttacgatgtcaatgaccattttccttaaagattgtctttgttttttggtcaaattctggaaaatgtcacagttttcttcctgaagcaatttaaagcccacagccaaatgatggttctctaagactgaggaatcattgtacatcaaggcaagttcagagtctgtaaaaaagacaaaaggccaaagatcagcaaaactgtttgtgagaagtttatctgattcttaaaattctggatttaggatgtaatttcccctaaacttctctgctgcccttatcattacctgacaatatccaggagagaataaatcagataacataagagcaggaacaacactggaatgaatcttggggagtgaattctaatgctactaacatgtggcaggtcatttcactctgtaggtctcagctttctctaaagtgaaagaattggatctttaacctctcctctagagttgccatgagctcagcagaatatgacattattcttagtatctataacacatccagagcataaggttttgtattcctgataactgtgaattacctaccctgcactatataaagtgaggatcctgtgttacaggattgtttgtactcaaagagggtacaagaacaataaggaatcatatgaacaagtttagatttgctcatttgctcatgtatagctctgaaagtccaagctttattcattgttttccattttcttttccaagtatcgtggcagtcattgtatactgtacagggatattgctcttcctgcctgcttgctcacagcttcacagtgatgttgtgtttggctgtctgtataccctctggtgaagattctgccactctctccctactgccctagacctgtgaattttaggcagggagagattctgcctctctcctacttcttgtaaatagcagacccagagctacaagataatcattaaaaaacttttgatgctttattctctttccacttaatcactgtaaagactaaaagcaaatccgaggcaggaggattgcttaagcccaggagttcaagaccagcctggtcaacatagggagacctcatctcgacaaataataaaaaattatctggggatggtagggcgtgcctgtagtcccagctacttgggatgctgaggtaggaggattgcttgagcccaggagttcaaggctgcagtgagccattatatcgtgccactgcactccaaactaggcaacagagcaagactctgtttcaaaaagaaaagaaaagaaaagaaaaaggttaaaagcacaggtatttgatcttttttctaacgaatgcatagaaaatatataacgaatgcatagaaaatatatttggaaatatatatctttttttaagaaagaaatacccaatactattcaatggctattttaatggagctaggaaggagaggagaggcttaagacattttcaactgagaaattctattattttatcggaactatagaaatacaaatttgcacacttaaatttctgctcccaaactacaggagcagagctgtttagactagtagggagtaggtttgtacagtatttttttgttattttttgttttctttagataaaacaatagtgtttatcttttaaaaggcagtttctggtgaacttttatagtgtctataaatgcctttatgaacctttatctacagataggtaagcatatagaaatgaaaaatttaaaactatataggttcttagcacatattattgtatttctacagtggaatcaaataaacaaacatatattgaaaggaaggcataattattagatactggataattattagagttcgtttaaggaaggaaatatgcatgtagacaagcagtgttaacagaattgacttagccttacaaaaaccctaattggcttatatgaagctgaaggtgaaggaaattaaggctgttgaccctgcaaaagaataagatgatgagctcttccttcaaggaaaagggtgatctgttgtatggaaggtgcaacaaagagtctgagttctactggatataagtagggcctttcatgtagggcagatgtccaagaatactggcaaggcctgtcttggagagtggttatctcctgacacttaaagagtccagattggctagaaaagccaggaaaggatgccttagtggactggcaggcctccatagcctcttccatctcagatgctgttacaggaaagtggtggtgactgttgatttttaaatgaacaaatgttagcatttaagaaactgaatctcaaggaagttatttaactttctactcttctttaggactgaaggcatatggtcacatttaaattgggaggtaggagtctgcagctcctcagcagattttcatcaaagacactaatccattacttgtaagtagagtccttgaaggttcaggaatgatcagaaagttgctgtcaggatggtacagtgcacagcacagaggggcaaagaggttagcttatataacatttttgttgaaaccctttcatcttcaagcccaatataagttacctcttccatcaagtctttcttaattaccagatgaaactgcccactttctcctgtaaacttctatactactttgtaccacccatttagcatgtatcgcattctaccttttttgtctttatctctacaaatcttttaatcgttcctccccaaaccctcccaacctacttagagacttaagcccctacaaaatattaaaggttattaatttaatatgtttggttatctggcttcccctaggcacttcaattatttcaaacttacaaagtacaaacaggaatacagcaaggcacaacatttagaggatttaggtgccattgtgttaaatggtttatgtgaatcatctcatttaatcctcataactcttttaggaagatactgttgttatcgacattttaaggctatgttccattcatggatggcatggagccatataggtgggaagtaagtctttgtgtccttgggataggctgggggatagaaaatgtcccttggggacatcttttatacacataaatatttacatagacatactcatataatcctgtacaaatgaagaaaatgtacctcagagaaggtaggtaactttgccaacatcacctagccagtaagtgctggggccagcacttaaaaccaggcagtttctagagccctcaccttatactgactatgattacaagtaccttatagaggtgaaaacctgagcagtgaacactaaacatgaaccaggaaatcaacacagtccactcagtgcctggcacacatttataaagacaactttgtaagtatttattttttattgagaggccatgcatacctttacaaactcaaagccatcattttattatatatagatcaattgtgctcatttgttacaactaccctggatcatcaagaataaattaaattatgcccaacatatgctactactgaaggcaggaagaccacttttgtgtccctctcttctgagtgctaatgaaatggggggaagggtgggcaggtactaccacataactgagaacatgtacttcatctgtgctaatcttttctctctctgtattaatcatggttctccagagaaatagaatagacatatgtatgagtgtgtgtgtgtatgtgagaaaaagacacatttatttattataggaattggctcaggcaattatggagtccaagaagtcccatgtctgcaaaggtgaaccaggaaagcaagtccaaaggccagagaatcaaccaggaaccctgatgttagaggcaggagaatatgtatgtccaggctccgagaaagcaaattgcccttcccccaatgttttgttcttctctttgaggtcctcaatggattgactgatccctgccaacaatggtaagggcaatcttctttaatcagtctaccaattcaaatgctaatctaatctcttccaggaacactctcacagacgcaccccaaaatagtgttttaccagctatctgggcatcccttagcctagtcaagctgacacataaaattaaccattacaaattctgccccttgtcaccctggtacccataagcatctcctttaaccatatttaatctccataaggccataattctaccaaacaggctacaactatcctgcatacaactaaaagcacactaacacattccccagaagtgaaagtaaagtttttgagtaatgtttactcttatcctgatagcctataacttaaatactatgatataaaataaatacttaaatactaatataaagttaatacctcttatgttatataagggaataagaaaaagaaaatgaagataagttaatacctcttatgttatataagggaataagaaaaagaaaatgaagatatatgcttaatatatgtatatatacatataaatgcattcataagaaaatactcatgacaattatagtccttatttctataactggtcatatggtcatagctggtatttgtaattaccttcttttactactcattctgtattcccttttccctcagcaagcacctcagctggtcatgattctttacctggtggggtgaccgaaaccttcattcgtgaagggtatgggttattagtggtcctgcctggattgggttattttgtgctgaccttaattacagggcatggttaatactaagggatgccctaagggatctccttattccacacatactcttccttaccttcattgtggagtagtaacccaatttccccttggtagtcaggatcagtcaccccagtcaacactgtaatgcccttcttggatgattgaatcagatgcataaggagctcaaagtggctaggtcttaacttccagttcaacggaatcactgttgtgtctcctgatagaagcattcctccttctgaaactaagacctctagctagcagcacataaatttgcaggaacaggaagcaaactttgctagtgggtcactgggggtaattatgagtcgtaacagtcccatttctatccaatgattcctggacccatgaattctggttatgcgagaaatagcaccacatattggatgctgattcagagcatatatggcctttatggccttctggagaaccttgccccagccctgcaaggtcttgcctcctagctgagtaactgagtcttcaaaaggccattctaccaatttatcaagccagctgattcaggatgttagggaatatggtaagactagggacttccatgggcatgagcccagtgcagctcttctttgccagtaaggtgagttcctggttagaggcaatgctgtatggaataccatagttttggcagaaaaactgcagggaaggcacatctgtttccagagaaagtgccttttccactaaggacaaaatgctaccctttccaccatggaagtggtccaatgtaatcaaccagccatcaggtagctggctgatccccccaaaatggtgttatatgggggttcagtgttggtttatgctgctggtggattgcgcacttagcaatagtcatagccaggtcagccttggtgagtggaagtccatgtttctaagcacatcctgccacctccatccctgccaccatggccactttgttcttagcatgttgggtgatgacaggggtggctagggaaccaagttgactagtatctacagaatgggtcatcctattcacttggttattaaaatcctcctctgccaaggtcacactttggtgagcattccttttttgtccattcagagagatcattcacatatctcttccccaaatttctttctcaccagttttccaatcatattccttctaagtccctcactatccagacaaatcattggctacggcccatgaactggtatataattgcacatatggccattccctcttccaagcaaagtgaacaacgagtcaccttgcctaaagttcttcccactggaaagactccccttcaccaccatccttcagagatgtcccagagaggggcagtagtgctgcagctgtatacttccggtggtacctgcgtatcacgcagaaccatccgtaaaccaggccctctgtcaactacttgcagggaactttccatgcgaccacatgtgtaggctgggagaaagaaggcagtgtaattaataggagtggcattagggccacttctttatgtaatttgtgcctttagtgtctgctcggacctgatagatcgtgtattacactacttttatttgatgatgaaatgtcgtacatgcccaacatatggcttggcgcgttagataataccctattaatgatgggcagacagcttaaaccacatggaaacttggtggcccatagtcagtcagtatctcctaaggcccagcagcaggcctatatctttctttcaaaaggagagtagttagttatctttctttggatgatggcagggtcttgctccagagtctgtgctgtgattcacacagagggctctgtcaaaggctccaaacaacattcctatctgccactgacatttcaagcaccattaaatctgctggatcatgtggcccatgtgcagagcagcttgcacagcaggctggacctgttgtagagccccactcaaaactagcagtttttgtgacactctcttgttctgtgccccatctaaactagcagcttttcagatcacttagtaaatgggccagagtaacacacacaaagaaggaatacattgcctcccaaatccaactaagtccactaggtattgtgcctttttgtgtcttatgatggagtccacatggcagatcagagccaatattaagacctggagctgaaacagttaagactggggcagacactatagatatgtatcctgtaagtaagacttacactcactgttcttacagctttactaggcttagccttgagttagttagaaaatgacagcatgctacaccatgtctctaagttacaactgaaataaacataaatcttcaaaaggacttcagaaacaaacatttctccatgaaatgacagagggaagtggtggttttaacttaatattcagttgtcaagaaaactgcctcattcatcactccactctctatgccctcaccctgcattattttcctccatagcacttagtaccatcacatgccataaattcacttattatgctccaccttttctagcagaatgccagctcttaagagccagggatttgtcttgtcttgtccacccatgtgtcctaagtgcctgaaataatatttattataacatttagtaggcttgcagtacatttttgttgaataaaataatctctgtagctatatctatataatcacatttgataaacatgaatttatccttattttgaaggtgtgggtttatacagaaaaataaaattctacatacaatctactagtgtagctatgaaaattttaatttcaaaataaaagtagagaaataaaaaagtgtatactgacagctagatacatcttaaccttaatataatgaaatgcctctgctcttggaaaccaaaaaccgcatgctttgaatgcatcactaatgtgaataaatctttctgccccaaacttaggcatctttgctattaacaaaaataattcatttgccaagtaaaatttaatgctatattctgtacttttgatactttttttcagaaaataaagctaagttaaatataccctccagcattttatattcaaaagttcatgctgctatttacattttatggatttatttatttatttatttatttgagatggagtttcactcttgtccaggctggagtgtgatggtatgatctcggctcactgcaacctctacctcccaggttcaagcaattctcctgcctcagccacctgagtggctgggaatacaggcatgcgccaccacacctggctaatttttttgtatttttttttgtaaagacagggtttcaccttgttggccaggctggtctccgaactcctgacgtcagtgattcacccatcttgacctcccaaagtgctgggattataggagtgagccactgcacctggcctatggatttatttatatgcatcatcctttaaaaatatttacgcagcttcctgcctgaaatttcaatttctctaaatcctgttcacagtacccacactcaaatcatttattatagcttaaccaactctaccaggtagaattgttctctctgcttgcagaacctccagcatgctttcaacgagtgtaaatacaattagtataaaatcatttggcacctaaagctaaaacaactgaaataattaagaaaaacgaagagcacatgtaagaagcaggaggattaactgccctgggaaccagccaagggaatccccagcgccccccatgtgccttaagctctcagtgcttccgtagcttccttaaagtaagacaagtaaccaactatgggtttataaatttgataatcagaggtctttagaattctttattatgagaaatatggattcagctgcaggctttggacaggatggcagctccagctctgaggcaagagctgagaatgtgctggcttgacacatggatgctcaagccatccataaaatataaaaagtcaaattttaaaaaaggtttactgcaaactaaaaataagcacaaattttgataaaatatttcacgaagctacatatcacaagtttacaagttattagaaggattcctttactgcatgctgggaagataattctcttacatgatccctagccaaaccaaactaactaaggctgtaattttgataatgccctggggcccggaacaaccctgggatactttcctgtacaaagtgacaatgctgattcattccctcaggaataacacagcctcatcacacctcatcgtcaaaaaaactttagcaatccaaagctactctggcaactgtgaacttccctatgtcgctgtggtcacacagaaaggagatcattgcaatattactaaataacaaagaaagaatttgcagcggcaggattagttatccttccatcccaggcaggtcaccagcaaaatgactttaaacagacatcctaaggagataaaattatcttcttcagtttcctccactatttcattggttctcaaactttagagtatcagattcatctgtagactgaggccttgttagcttaaatggcagactgcacagggaccctgatgccagggtcctccaggtgccagtcaaagcccaagtgccctttaaagcaggggtccccgatccatccatcggctgtggaccaatatcggtccgtggcctgtcaggaactgggctgcacagcaggaggtgagcagcaggcaagcccgcatcagtactgcctgagctccgcctcctgtcagatcagcagggacattagattctcctaggagcgtgaaccctactgtgaactgctcatgcaagggatctaggttgtgcgttccttatgagaatctaactaatgcctgatgatctgagatggaacagtttcatcccaaaaccattctctccctgcgcccccagtttatggaaaaattgtcttccataaaacctggtgcctggtgccaaaaacattggagactgctgctttaagggctcaaaagaatgaagaatagagcaggtcctcattacccttaaaaaatgtatcagagtacttggaagacagtgacctttctatcagttgttttaatttgtcttctaaatctactcttaattctaagggaacatataatatgctatataacagaatgcaaagaaaacataccagtttgaatgtttggtgtttaagatagatatatatatatacctttaacacaaaaattttatgtaaaaatacattttatgtatttactaaaaattgataaaattcagaatatctcaagacattcataagcatcaaaataaatcaggccaggctcatgtaaagtgccagcatgcactgtattgcatgacctccctgctcttcttagaaaggacataatgaaccctccccactgatacctccccactgataccatgtaaatgcagggagctgcatccaatgtatattaatatttgtatgtatgctttgatgagttctaaaagtacctcattataggtgctcataggtaggtagaacatgaaatgttatcctgtctaatctggataaataagttcctaaactaaacttgtaaaaaaatacttgactaaccacacatctcaggaaatccctgacttttccagtcctctacatggatgagtcattagagtatattttgctataggatagtccagaggccattataagatataaaaataggtaaataatcctaaagctctgaattaaatctctcaaagcaaggttacctctacattccttctttaaatctggctacagcaaagtacaggaaatgaatggtgaattcataaataattctatagctagattgctataggcacgagaagactattattcatagcctcaagcaaaaatgaaagaaaggtggattcttaagcatacaacattttcaacaactttgcatattttttatatataaaagtgaatttatgattttataatctaccataatttataatctaccatatgggagggaattaagtcatagttcacttaaatcacttaccaattaacttcaagtaccaaatagaatttctataaacctaaatctctttaccaagggatagctcaagcattacctaaacattccctacacaggctttctgtgcggcaatgtcagagatgctccatattaaacagtctctactattccttatatttccaaattcagtgatgacttcttataaggtgagatgttaacagtgagaaaaaaccaaatggttgaaaaaatattaagaagttcctgttacccttattagaagattttaaaaaggaaagaacaggggttgggcatggaggaggaagggaagctatggcctctgaagaggattaaatgatgacctacataaagtgaggaacacttaccattaattctcataactttttttttaatttaaaactttagggccaatacaactttctaaatctttctgcacactttcatttttaattacccttgtctagtaacacagcaatatattacttttaaagagaactggaacacatttttcaaatatcacatgcctcaagggatataatgataattttcagttaaattacattaacatgaactatcactaaaacacatatatacacatctcaaaagaacattatggctctggaagactctgagtttataaagacccttagtcattctaaaatgtacaagggaaaaatgtgttctgaaaaaataaagtttacttacttgtattgatcagaaattgattggacacaccaggatgatctacatcatgtattgcactggcaaaaattgctgcaagaatctccaaatctgtaaacacagcctggaaaatcagacaatatagataatattactattctacaatgatatgaattaaaagtataaacaaataagaaatctctagaatttaaatggaaaacaaaatgaagcttcaaaatgtgttacaatgtgtcaagggagagtcttagatacttgtgaacttttaaagtataatcttggaagaaaatattttatctaattttattacatctcatgatcaaatgttttccattcactgtattttttaaaatattattttaaaactctgaaattattttaaaagaaaataatagtttattttctaaatatttaagatgtctaagaatattctgaaaatgtacataaaattagtaagacattagcaattattttctttcatcgaaaccagggtttctcaacttcagcactattgacattttgggcccaataactctttgcgtgggaggctgtcctgtgcattgtaggatttttagcagaattcctggcctctaccaacaagatgccagtatcatgtacaactaaaaatgtgatagttgtgacaaccaaaaatgcctccagacattgccaaatgtccctggtggtggcaggagggaaagaaaggggaagagaaaccatctccagttgagaatcactcacccatatgatgaggtattaacataattttataatgaaaacaaactgaattataaaatatatttcttaagaaaatcaaattgctttagtaaacaactaatgaaataacttcttaggatttagaaaaattaaagtatgtccttctaatatattctatgaaaaaatatcaatatattgcttatgttttataaaacgttctttggcctataaataaaagccgtcagactagatttcaagaaaacaaatgaacaaaaagtgagtaagccagatgtgctttatgaaatgttcagtggatcatttcaaagaagcaatatcataaacagatcaatcactaaatctgtgaccaactttcataagcaaaatccatcaaagacttgattgtctattaactatagcattttcccccataagtcaataagttatacttccaatgaatccaattatcttctccattgaaaacccttcagataaaagtttaatagacctttatgagtggcaagttagtgttcttgaaatttcagaaacagatttacctccaaagcaggtgtagataatagcacatgagtagactggacaacatctgcagcatggatattgttgtgataggccacatcagcatggtaatggtcttcgagagtcataagatatgtaattaaagtatctactggaattttaaatgtttttaataaatcccgttcctgtaggaaaaaaaatcatcttaacatttttgtctttatgtgaaaaatttctccatagagtatgtttaaaaaaaaaaatcacacaccagtgttgccagtggataacctggaaatggcaactgcactctcacatgtctagtgaggaaaatgggaacctctgagaagatccagggactctgggacaaaaccagagttgggttgtcctgctggaacccaagaatactacgccctagctgtatggtgtcaggaatgaggtgccaactctaaaagtttctatgtcccattatcatggaggcagctccagtcaagcactattaactcaacccctgcatcacaccaactaaaaatcaacgtcctctctagggctgaagtttcccatttcggtcccgagatatctacagcagcctcaacttctcatttaaatcccaccctaagctggagcaaagggtcaataagagagagaaatggatatgaagaaagaagcaggacacaagaaagtgactgaaaaaactatattctaaggttagtagccagcaggggctttattcattttttttaagttagtactccattctctatgcagtcaggttcagatgactaagatgatgtctaaattattattttaataaattgcttcaatttggctatatcacatctttttcttaaatgcaaaaaaaataacaaaattgatgttatttgtggtttatccacactccacctttctgtatctttacttgtcccttggcaaaggagcaaataaggataaaagtataaaaataagcaaaaggtggggaatattaaaaaagacaaaatgtatgcataagctacagactggacattaagttcctaaataaaataaatgtaatagaactcaaccaccttacctgaaaaatggtgtgcatgataacagtcaagggccggttaccagacaactctgctattctgaaaacatgaagaccccatttgttcacatcttctagttcctggagtgaaaaaaaaaaaaagatactaaaatattagaaagtggagtaaaatatgactcaatgaacacaatcatttaaaaattacagaccttaggtggccgggcatagaggctcaagcctgtaatcccagaactttgggaggctgaggcgggcagatcacttgaggtcaggagtttgaaaccagcctgcccaacatggtgaaaccccatctccactaaaaataaaaaaaattagtcaggtgtggtggtgtgtgcctgtaatcccagctacttgggaggctgaggcaggagaattgcttgaacccaggaggcagaggttgtagtgagccaagatcgcgccactgcattctgcaatccaacctgggtgacagggcgagactatgtctcaaaacaaacaaaacaaaacaaaacaaaacagacttcagtgtaaagattgttagattgttttaaacaatgattcattttaaatgttaacagacacaccatgtaagcataggcaaactttaggcacatttacttaaatgtactgaaaattgaacagtatggcttaaccttgtgactttgacattacaacacatttatgtactttttaagtatcaatcacaaagcacttctttaatggataaaatctattcacaaaaccttaactgttttcctaaaacccagaagacatgacagatttctaactctttaaggccaaacaatgaaatgaagatgcaaataatcaccccccaaacccctaaaacataccaaaccacctgtctaaggcactttaaaaggagctttataaaatgccttcccatcttcaaaaaaagaaaaaaaaaaaaccccaattaataaacttttctatccatttaaaagactagaagtgaaaattcatgaaagggcatcatttaatatttatgatcctgatctttgaaatcatcataccttggcaaggacatcttcttgttcagttttaactccaaaccttgggatacttgaattagtcagactagagctgtgcatcaatttcttgactccactgatctgagacattggtcttttctttttctccttttccttctgagttggagaaggaatttccacttcatgttgcttatcttgagaaatttagaaaatgttctatatttattattaattctatctgttttatatcatatgcataattggaaggattataattgatcattatatattccaggaaatgtttccaactaaaaagtttccttttagagagttcagtatttacatttgaattggacttaatttgatgtcttcaaacacaaaattaagcaaataagttccattacaaaataataatatcaaatgtattccatggttacctctttgatacaatgtcctaataaaaaatgctgcaagacttagcatgacagcagactcagaatacacaacaggtggttatttccactgttcaattccattcctttgtgaaactgacttaatgaactgaatattgttcttgccaactaaggactacagtttcaatacatactttgaaatggtagaaactttatacgcaaatgtcatgaaaacagcagtatataaaactaacagctaactgaaatgggtaacactgtgggagctgaaacagcaggttttggatgacttagattaattctgctactttttatttctgtatgatagtgagataagggttaaatccccaggttttatgggagcatagagaatcataaatattacctgataagtgaatacgtacataagctaattgtgttctatagtaaaagacctaagatatcttcttactttcatccacgatttcaaggcagtgatgagcaactctaactcatccttatatatagaacatattctaagtgtttaataaatgttaactatatataacagcaattttgttttgaaagtaagtccaggatacattcaaattactgacctttatttactgcattttctttctgtggatgaggtacaagagttgtcccaggacaccaaactcagctattattagcaaacttttatttagcaattgtattttatctgcccaccagtttactaggcttgatgtacacaagacggtaaattcatcgagggcaggaatcatttctaatttatcattaaacacctattgcccaacaatggctggcatttaataagaatttgttgaagatatgaatagatctctctataaaatatattttacagtttggtactatgaaaaaatggcaatatataatcttaattcaagaattcctaaagtcctaaataaaactaagaaaatgtaccttgtcacctgcaactctaaaactcagaggcggatagtgtcgaattattaatatgacgaatgaaaacaaatagaacttctaacacttgtttggtttccaaaatgagttggcaccccaatcctcctacaaaaacaaacaagcaaacaactgaagaaaaaaatttaattgcatgttgttattctcacctaagaatgtgtttgatataaactctgacacttgatttccagaccgactcatttcagagagatgggtgagctcccgattaagcatccttttaaactgaaaaacagaaaagtaaaatgaaataatagaagaggaaaatttaagtgaaatatatatgcatactctgagatacaggaagatatgcccaaagaatttttaagttgtcctgacaatttagaacagtgccttccagcagaactttcttcaatgaggggaaaacaccataatcggtgctgccaattatagcagtcactagccacaggtggttactaagcatttgaaatgtggctagtgcaaatgagaaaccaaattttgaattttatttaattttaactacttttaatttaaataatcacatgtggctcatggccaccagactgaccagcacaaatttagactcccaagggctgaagggaaaatcaggagaaataagcaaagaaaagggaattaaaaattaagatgtattattagttatttagagaagagagaaactaatttatagcacataaaagtgttgccatacaataaaacatggaatgctttcttcaattaatttatcattagcagaaatgaatatatatactgatcaagggctcaaaatttagtcttttactccaaagcaaaacttaatagacttgagtactcttccaggactatggagaagtaaaatatttaaataaatactgtataatgtttccttttaaaagttgtttttcaagtaagagtataacacttattgtttctcaacatccacaaaatttaccattttcccaagtcactaaataggaaacaggtcaattttcaacaatctacttcacagtttttattactgatgccatagtgcctatttcattgaaagaaacactggaattaacctaccaacaccacatggcattaccagtatccaaatctcccaaagattttacacttctcccacccccatcagctgtttcttaagcattaagcatttcagagtcctttgactctgaaaacaacccgacgaggccttttaataagcctttaatatttgccttaatatacagaaacaatgtattttttctacacatagagtaactgctattagatacttgacaaaaaaaagtcagatgcatttactctaatcatcagattagcctttaaaatttgaaatttcaccataaattctcatttaagtatgaaggtaagtgttgaatgtatattttagtgatgtttgaaatataattcttagtatttaattatttagaattattttgcttctctgcataattcataccaagatggcctaactctataccgtttgctaaataacttccaaagtcaatcttatagaccatctagattaagttttaactccgcatttaactgttatcaaaacaaacaaaaaaccctcaaccatttcaatggactgttggatgagagaaatgtgtattcgcatgccagcgtagtcaaaaacaaagaactcgtcatttacattgggtgtatctcctaatgctttccctcccccctccccccaccccacaacaagccccaatgtgtgatgttccccttcctgtgcccaagtgttctcattgttcaattcccacatgtaccctagaacttaaagtataataaaaataaaataaatgctggggaaaaaacaaacaaacaaacaaaaaaacaaagaactggcatgaccagtacaaattctggttgttaaattactggtctagaaagcttagtctcaaactcaggaacactaaattcacttctttgttcatatgtttttataactcctttctaattataaaatgtacatgtgctatagaaaatgtagaaagctataccaaaaaaaagaaaataatgtaaatccccactgctggaagataaccacagataatttgttaaatttccttttatgccttttttctacccttgtatgtgaatacatatttttaaaactggcatcaggtggtatacagaacataggttactgcttgtgttcactcagcattatatcttataacctactgaaaaaaataaactttgggccttctaagaatatttgtagacatttataatagagttcaaaattttttctgtccctctttacaaagttatattttcttgagtaaattatgggctatcatataatttaatgagctaatatagaagtgtcttctatttagcctggcacatagtagatgctcaatattatttgagttctttctcccagctcactttctggcacttggtccataacttttgggccttttaaagtaatagctgatttttatcattgcaggtcagacagatgaaggatttgactgtagttataaccataaaaatagttacttaaatagctagctcctctttctcaaatcccataaagaatttggaatagcattagtatgggaaaccatagctatgtctcaaaagcacagctaaaatgtcatgcatacacaggtttaaaaaactctttgcttaagacttggagccaacccaaatgtccatcagtgatagactggattaagaaaatgtggcacatatataccatggaatactacgtagccataaaaagggatgagttcacgtcctttgcagggacatggatgaagctggaaaccatcattctcagcaaactaacacagcaacagaaaaccaaacaccacatgttctcactcataagtgggagttgaacaatgagaacacatggacacagggaggggaacatcacacaccagggcctatgagcgggtagggaggggaaggacagcattaggcaaaatacctaatgtagatgacaggttgatgggtgcagcaaacgaccatggcatgtatatacctatgtaacaaacctgcacgttctgcacatgtataccagaacttaaagtataataattaaaaaaaatttgctttacagataaattcacacttggaaaaatatactcattaggcaaagcatattccaaagaaaagagtctgctaaacattttaaacacacattcaatgaaatatctctttgacctaaaattgttcatgttatgagctaaaagttgctattaagaactacctggtcatgacaaagtcttttttttcataaaagataggagatgaggcaaagctttcaccattgctagaatctcagcagtctatacaggaactgctgccctccttgcacttctctcaataaagcaaaacaagggaagccttctgggagtgattgataaagatagatagagacccagttatcacaggtttatcttctaacttgtacacaaactagtataaggattatgttgcccaaagagaacatgtggatgctacctgcagatatgctacatatattattggatttttctaaaagaatataaagaacgaagtataattttcctggcagtttgcttaaacaattcaccaaaatagccagttagtacagataactgaagaaaaaagccagtgaaaggaatctaaatattgtacagactagataagtgacatcctgcatgttcatctttctggtcatatacattattcccagagtactttccagcctttgtttaaaacacaaaaacatggattggagaaatcctccatcacatgcccacctccctaccaaggcttataagggactccaaggaagtcaacatttcattttaacataattataaaagacaatatttgaagcaattacttctctactctaggaagacggtctaaggaatttcctaaagataattctgaagcgtacattaagttataacacaagggtattttctaaaaggaattaacattgttttccttttttgctatccatataaaagtttcagtccagcaaagctaaatgaataaccacaaaaattaccataagtgctttctcaactggtagttgatctcacaaattggttttggagtgcatagctagatgtactaaaaaaatgcactagatcattcaacaaacatttaaaaatgtgatacttctctcatctaaaaataattatataatatttactaagataactacataaaattaccaaagggggaaggactgatttaaagctaatacaatgtattcttctgggaaatcccatcatatttctcaattaatatatttagaagggacaaaacattaaactgctgtttgaaacgaaccgattgtaaaatgcagaaccatttaagcatttagtttatttttttaagtgacctctaaatattttccattgatgaatttctaattgtttttggcctaagtagtctgaaaacaatacacagatttagggttgcaactaaaaaaacgggaggatttctaagtgaatgcttttgaatcctttgttctcattatacatcagaatgtctgtgtacagcagttaaggcataaaggaaagtaaaaatgcagttgaatctcaatactgtattttgcttttcagaactgcaattcttcaatttacattaggcatttaagattgttcaggaagcaaactaaaataataaaacaaaatgtccttaaatgtaatctcctttacttctacatcacgccagtgtgctactgggtatattatatatcctcccaatatatatttaaggaggtggtatgggtccaatagtaagaaaattttcttattttttcctgacaatattctgctaaaaatcatttgaatatgctgcactgtgatgcattacaagtttggtagatatcagtattcaaagttatttaaacaaatactccattgatggtataaaaataaaaccttcaaaatgcataagaccaaatatatctatatttgctatttttacatgtttttaaaggtacagtattaaacataaagctgtccaggaaaaattttcctcaaaaagaaacgtactaaaattctatatgtagattcttggcaatattgttcataatcatagtacaaatggttcataatcacagtacaaatgtgaagcccttcaaaaataacatcagttgtgagctggctaaaagctaggagctgaattctggcggataatgagggcttcttatatttactctctatacttttctgcatttctgaagatttttagccaagaaatggctaacaaaattcaaataatggaagtctatatattttaaaaacatttttaaaaatctgaatcatccacagatttaaagggaggtaaggaatcatgactacttggacaaccaagactgaaataagttttctaatttttttagaattcaagtaaatctctaaaacaaaggggaacttgtccttcaaaaagaaagaaacaaagcaaacgacaaacactccaatctgaaaaatcctcagagtaacagaaaatgaatcttttaaaatgtgttgtgattggctcccaggttcaagcgagtggctcaaataccaaaaatctgtgaagtgatgtttcatttaggactgaataaggtttttctacctccttctattgtggagacaggatcacaatgctaatgttaccacagggcatggaaaaagcctgccaagcatggacacaatcttattgaattgtttattaattcatttcttgagattcacaaaacagtgtaataaaaactttgttcagttttgcaagtataatagacaatcaagttttcactttagtatcacttacatagttaagtaatgtcaatttttaatgtcacctagggctttatagctaaaggtgaaaaaaacgtattcctcgtcaggttaaagtagtatagatttttagaaacagccacaaattaattttataaactttatgtgcaacatactaactggaatccataaatcagtataagtaatttggcccaataatttatttgcaatgaatgtatttaattaccatatatttttcaagcacaattcaaacatataccacatgacaaacagaagaactactgcgtatctaaaaaagctattttaacactcaaactacaactgatgaaagttatacaatcttatcttgaccactattaacacgtatttcttcctagttcatgtgtaaggaaagaatacataactgatagtttgaacaaattacagtagagtctaagctttctaaataattttgtaatcagagtaaggagttttcaaaagctaagtaagtcttacctttatgtagccccaagacactgacagtaaatagtttgcttcaggcatttttgattgattatatgtatatatatatatatgtatatatatagtaagctctaaaatgtatttagcttcaaaatctcgacactttaacaacctccacaagccacgcagagtatgagtttttaaagatttttggtaattaagtatacataagaaagcctcgcattaaatcccatccagccgtcttcccatcgaatacatgccatttgtaagactccagaatggcacaaaattcagcaactattctgaataaagaaaatccacgtgataaaggaatatctaaagatctaagggtctgcatctttctctcccgagctccagggcttaatgaataatgtatgtcaagatgcttagttgcaagaaaggctagtcctgtcaaaagctaccaaataaggaactgcagggaagccgggaagagtgacaagaagcccctcccataaaaccccaactctgcaccaattgcattccagctcttagcctataaggcgagggggtgtggcctcggtgcaggctgctttgggattggttggcaagggccagcctctggggaggctttctcctcacccgacaaacgccattgaataatggtatccctgcagctctgaggccaccctgagaaaagatgaacggggcttccctcttgcagtgatgaataatgaccataaaactcctcaaaattcgtagttcattcttaagaattgcccatccttttggagggcattttctatgaattttaatgtcctctggcttcccttccttccaaataaaaactgctccaaaaatggcaatcgagcattttaattgcttccctctctcaaatccaaaacaagtggctccctggtgatgtagaaatgactgtagttctcccctcatccaacataaaagcatagggattaaacaatacgactaatgtccagaattcacagatggcacagatggcaatgacacattccctcacctgtgtgccatggctgctctcagctccttttgtttctattgttatgtatgacagagttctaaaaccttcaaaatctaggggtgggaccacttgcaattctggggggagggaaatgtgaaagctagggcactgtgtatgcataaggaatgcagtgttttgtatatagaactcaggatctgtattttgatcagaagagaatattttatttatttatttagagacagagtctcgctgtcgcccaggctagagtgcagtagtgcgatcttggctcactgtcacctctgcctcccgggttcaagcgattctcctgcctcagcctcccgagaagctgggattacaggcgcccaccaccacgcctggctaatttttgtatttttagcagagacgggatttcaccatgttggccaggctggtctcaaactcctgacctcaggggatctgcccacctcagcctcccaaagtgctgggattacaggtgtgagccaacgtgcccagccagaacagaacattttaataactgtacacaaagttaagaaaggaatgagtggctcttaggaatccagaattgagctcaagagtaatcagacattttacgaggagggttaaatgagaaatcaaagttctttctagaaaaacagcattttctatttggtttggtgtagtattaccctgtaactttaatactaaagaggtcttgtgggtgagaaacaaggaaaaactaggttttagttgattttagcatataattctgtgcattttacctcctctccatctcaaagcctgtgcttactactctgtgctttaacttgctggtatggctactctgcagtcttcctgacatttaactatttccacatgtggcatgtctgtcttagagagcatgctctctgataagcactcctgtaacactgtgtctctctgagtttctattggcctttagctgctacagtcctctgcttttgttaacatctgttgtattcatttccatcactcttactcctctacaaaaggaagaaattaaagctccaacattccactaaagctacccccagaggaatactaaggtcctccttttctctggtctccctacttctctgaagtgttccacatgtttgatcattcctactactctccctcaactcccaggatcctgaacttctttaattttccctaggcccacaatcttcaatgaccacttctaacttgaacttcagtgccatatttctgaatacaagattctcctctcgaatgccctgctagtcacgacaaactttttcaaaactgtgagacatttttctatttaaagtagttcttagtataattacttccatttcagtcagtgagcctatatttcttccagtatctcagatggaatctatgactctttcctaccattcaacaggtgtttcatgtgcgtcagacactgtcaggtgtttaatataaaccatctagctgaatccttgagtaacccggcatgttcccctatacggcatcaccttccctccttcattcaactttgttagcaagccctatcttttatccagagctgtttctttcagtttattccttaccattacccctcccgtaatctgaatccaaatatttaaaagactgagagaaatagaaagtaactttaatatcaccccctctaactccctcatttccacataaagttgagacctagagagaaaaaatgattttcccaggttcactctggtactgagaacaagaattgcaagtttaaatcttttgtgcacaatcactgacaaataatctttttagtgtgtcagcttcctcatctgtaaagtggattactgtggcagctagtctccaaagatactcttaatgagccacactgtcctacactgaatctgagttggcttgtgtaaccaacaagtgatggtgcatgactgctgaggctaagtcataagaaatcttgcagctctcatcctgctttctttgaatgtgctattgggacccctaagccattaggttgaaaaaaaaaaaggtctgactactctgagaggctatgctacaagaagtccatgttaacttcacagacagtgaagagagaaagcgcaagagagcacttgcacaagaaagagcacacatgcctggccagtcttcagcaatgccagccaccccagcccagagccagacctgaggggcaagaagccatcctagccatccagccagttcagctttcagatagctacccactgggctgcaaccatatgaggaatgccaagcaagaatgtctagccaagaccagttaacccacaaagccatgaaaactaataaaaatacattcatatttcaaagtattaggtttgaagtgatttcttacatagcaataaataaccagaacagatacatatgaggattaaatgagaccatatatgcaaagcacttaaaacaacaaatggtacaaagttgaagataagtaggtatcagacagtaaagatgacagtgacaatgatcattatgataatcattctattatactaatatttaaaaaaattctctggtttgtcatttgtttttaaaatatatatgttatatttcctttcaattgcatcacagcactccatgtctcagggccaaaatgctgtaattgcttcttagctcatcttcttgcccctggcttttccccttctagtctcatattgacctctactgccagatcaattttcctcaaatccagccgcagcctgttacttcaaagctagtaatgcctgcttcatcacatccctctgtaaattccagactgccatatctgaccttaatccccaacgccaagcctattttcagctgctctattacatttgctctgttcctgaaagactagtactcctccaccttcaccatacagctgacaatcccatctctgtcttaccaaattctcggcctaaaataccctccttcttctactctgccaacctcaaactggttttctcagtcagatttaaatcattcaaagtacatcttaggaccaaatattccagcctttttccaaattctaacgattctacatctgccccttcattcaatatttattaagctcctactctatgtcaggcactgcctgagaaagagaaacaaagctttctcacctgcagcttatattccaaaactaagttaataaatacataatacgtcatggggtgataagcacaatggagagaaagaagggataaggattacggatagaggttgctataaggtgatcatggaaagcccctctgatgagatgacgtataccaggagatctgaagaaaggaaacaagccatgtggattgcggggtgagaggtagggtagagaagggaaaaccaagtgaggaatggcaaaagcaaaggcctcgaggcaaaacatacttggtgaggctccctgaagaacaggtggaagtgtcataccacttgtcatttaaatgcaaattacactctgcagtcaggctcactgccttccccctcctttaaaaaaaaaaaaatccatccatccatcaattttattctttgacaaacttaagactcagttactttttactttttataacaagtattcatcctgaaatgaaattcctaaatacacttccttcataatactgtactgaatacatataggctaaatactccctacatagatttaaaaaaaaaatcagtataatggcttatcagtgaaataaaggagaaatgagtaatttctatcaaatactacaaaatataaatacttgtacacaactacattttaaaaagtagtcaaaaactactataactgattagctgtgtgaccttggggaagctatttaaatttcccatacttcagtttactcacatggaaaatgagaataatagtttctaccttacagggttgttgtgaggattaaattagtgcatatacataaggctcttagaacagtaagtgctatctaagggtttgctatgatttctcttatggggagaattaccacaaaagtaacagtagcatgaaaatgaatacaggggtgttatgttagaaaaattttcctttttcctgatatgatgaatgattctttgaaaggtttcaaatgtaacaaagtgccatcttcacaatatacactattgctgcattactagaaaatttggtgtggattaaaaccatgtaaaaatatttaatacttatacgtaaaaagtagttgggttctaggctcagagaattataaatgcattttgttttttcacctatgtgaatagctgctgggactttttggaagttgtgtgggacacacagcaaacctccctggtgaaaggctgtcccatgtatcccaggacatctagcctccctggcctctgcccaccaagcaccaggagtactccccagtcactgtcccctgaaatttcctgaatgttccccagtgttaagaatcactgttctatttttttcaactgtcttcaactttgactcctcatccagggtggaggatctttgaggccagaaaagtatcttattatgtccctgtatttctcaaggtagtgtactattgccacaaaaagattgttggctgatgcagatgcaaaacatcaatatttttatactgattataggtgacaggaaaggacaagggttttcaccctcagcaaaatcatcaaaaacatttaaaacagattacatatagtagataatactccttgtcttaaaacattatgcagaaacacacatacagtttcccttccctctaaaatctgcagcctcttctccctgctgaatgtgagtgatggtcccttcattcaacagacttctatttggcaactattatgtgccaggcattctaataggtgctggatgtgaaaggatttaacttattcaaataagtccctaatttgctgcaataagggagattatttaatcatattgagtaaaaagtaccaaggaaagtttccatatttctagggaataagaaatcttttcaaaaatctctgagccaaattaaaattcatttcattttccctaatctccatttctaggagactagaatctccttcctattgccacggtagctgctatctgcagagagaatctagataatttagaagagaaatttgaatagagccagagagatacaattcttatagtcagacttggcttcaccaaatttaatgaagaaactttaataagttacaacatttactaggcacctactatgcacaaagaactttacatacctcatttctaatcttggcaacattctgataagataaatattatccctattttaacatgaaaagatggaccttcttacatattcaataacttgctccataggtgacaggattgaaatgcaaacccagtccttgctcttaatggtgtatgacagctcatcatataattaggctgatgcaaactctatgataaacagtatgaatctaggagtggatttgtttatcctcaatctttttgctaactttacagtgccttgaattaaagaatcatggttactatcaccatggtcagatctctggacagggtgaggaagcaggtgcccacaggcagacagccctgccatatagtgagacacgcttatgtttgggagcgctatgtgaacaacacacagctgccctcatatgcagatgtaatgatgacgacacattcagacaaggaactgaggtccagaaaagttctgacaacacaacttgagggacagcgttacagctagagctcaggtttcttatctgtaatccactgctctcaaatgcccaaatgattttatatacatatatgcaagtgtgtttgttgaaatagaaaaaatagtttcttggcctggtgaagtgcctcatgcctgtaatcccaacattttgggaggccaatgcgggaggattgcttgaggccaggaggtcgagaccagcctgggcaacatagagaaaccaccgtctctacaaaaaatttaaaaattagccaggtgtggtggcatgtgcttgtagttccagatactactgaggtgggaggtgggaggtgctgaggtgggaggatggcttgaggccaggagtttaaggctgcagtgagctatgattgcaccactgtactccagcctggatgacagagcaagaccttgtctcaaaaaagaaaaaaaaaattcccataatgttcagttagttctctttttcagacttttcctagaaatacccctcagaatttctagaggccacttccctgctattccttgttttctcagtccttaccagatacccaagcaattaacaatctttttgaactatttcagtacatttcaggatatttgaaattctgctgatggagctgaactgctgatacattaacacatgctgtcattattgactttgtaacagaggtcaagagagaaaagatgcatttttgaatagggaaaaacaaaactaaattatggggaaactaaggctcagagaggtcaagttgtcttgctcaaggtcacaaagccagtagtaagtaacagggccaggatttgaacccagactgtctggtttcagagtactctaaattgccaaaaaaagaaaactatttcaggcattattttatatttagcctagagcctacataatagatccgttaatataatcaattctaagctgtatattatattactgtgtttgaaatatttaagaaatattgtttaaaataagtgtattagctcttggacctctccaacataaggagttttccaggcagtagcactgtttgcagtaggacttacattattggaaaatattttatcctataatcaatctacatttattttacacctttcaccttaaaattaaaagtcgtggtagttattaatcaagaagcaaatctatataacgtggtctctcatatatccagtactgttcagcttgaacaaatgcaaatctaatttttaaatgtcccttgaagaattctgaggcaaagttaaacttcaagtattaaacagaatagccacagaaaactagtgtttctcagcctccctttgctttcaaatgccttaaaaatattttagaggcagacaataatctagaattgattcataaccaatattttacataacagaatgttacatgtattttcatattataaaaactatactttctttgattaatgctagtattctgaaaacatcgttagtgccagtaaatccactaaatctgtttgtatttactgccctctagtgataatggctctacatttgattaagaaaaaactattcctttcagtaaatgaaaacatctcttgtaagttttatggagatttgagattaagaggaactccaggctgcttttttaaaaccaaataatcatctgaacaagctgagaatcgttctctaaatgatcttattttaatttttttttaacaaaaaagtctcatttaaaatagtaaacacctgcaacatgtatggagaaaggaaaccatttttgctaagaggctccttgaagctgaaataacatgagactgatctgatagctgtatttatatttctcttctacatgggctaactctcttattagatgttagcatagtattctgtaattgttgatacagtttgaattcatatatggtagagacagagttttgtataactatttagtcaatttacctaaaaccagcagcagcagcatatctactacagacttttgtttcactgaagaataatcatgacaataaatgggtgcaaaaacttcacataaatgaagcctccacaaaaataatcttgtatgaaaaagtattgtctccttatagagaaaattaggatctccaattcacttaaattggcctaaatgaataccataatcatcataaaatagttactaatgtcccctctgtacttcgtggtatgctttgtggaaacaatttaaacaaagagaatatctgtctcctaaagtaataataactagtgtaaataggcatgcttccagaaatatataatcttttacacatatcactttaatatgtgcatcttaaaataattttaagtaataaaatttgagctataaaagagaaatgatattcttttcaacaaagaatgcttgaacaattgagcatccactcataaaacaagaaacttcaacctttatcctgcaccacactaacatctacttgaaatgaatcatagaactaaatgtaaaatctaaaactaaagaacttctagaagaaaacacagtagaaagtagttgtgatcttgcgttaggcaaagatttcttaaaccacaaaagcatgaagcataaaataaaaaatggtatactggactttaccaaatttctctttgaaaaaaactgttaagaaaacagaacaacaagccacagacttgagaagggaatatgtacaaaatgcatatcaaataaaggacttgtatccagaaattattttttaaaaaatctttacaacacaataagaggacaatccagtgaaaagatggtcaaaagatttgaacaaacaaacacttcataagaatcaaaaagatcaataagcatgtgaaaagatccatgaccatcattagacattagggaaacaaaaagtaaaaccacagtgagatgccacactacatacttactagaatgtataaaatacaaaatacaaacaatacaaaatgctggcctggatgcagagcaaattaaattctcatacattgctagtgagaatgcaaaatggtatagaaactttggaaaaaggtttgacagtttcttataaagttaaaaagtagagtgaccatatgacccagcaatcctacttctaagtatctacccatgagaaatgaaaacatatgtctatataaagacctatatgaaaatgtttatagcaactctctatagcagaaacccagaaacagttcagatatcagtcaactggtgaatgggtaaacaaattgtgtccataaaatgacatactggaaaaaaatgaaatactaaaaagcaataaaatgaaacaaattaccaatagatgcaataacacaaaatgtattataagtgaaacttataattcaactcaaaactcaaaagtattgtaagtgaaagaagccattcacaaaaggctatatctttaatgtattattcattctggcaaggcaaaaccatagggacaatcagcactggacgtggggtttggggaatgactataaaaagcaagagaaaactttttgggtggtataaatatcctatattatatagtacatatatattataattacacattacctatatatctagattatggtggtggttatccaattgtacacatttgtgaaaatgcattcaactatacctctagaaagagtaactcttatgtaaattatacctcaaaaatctaactttgaaaaatattagctgatgttatcaaattatttcaattccagatttgcttaactttacaactttgcccaaagataaatgcaaaacaaaaacctcaggcatagttatgtatgataaaacaccatttttaccctttcaaagagctccaccattatttcccagaaaacaggcatacagttatccaaggtccacattagctttaatgatacaacattcagtgaattcccagttgtgaaaagcctttaggttggcagggcgctgtggctcatgcctgtaatcctagcactttaggaggccgaggcaggcagattgcctgagctcaggagtttgagatcagcctcggcaatatggtgaaaccctgtctctactaaaaatacaaaaaattagcagggtgtggtggtgcactcatgtaatcccagctactcgggaggctgaggcaggagaattgcttgagcccgggaggcagaagttgcagtgagctgagatcgcgccactgcactccagccggggtgacagagattctgtctccaaaaataaaataataagagaagcctttaggtgataaaataatagtcaaagtattcttttaagtattattattttatttttttttaattctttgtaataaaaagttccataaagtaaaatattgtccttttttgttttatttttatttgtatcaattcaaggggacaggtgcagtttgttacctggacctgatttttaaataaatcaaactcagtttagttatttcatggtgatcctgggagactgtttgtcagtcatcatcgaatagcgaatgagtatcctttgtatgctcattctaggctgtaagtaccatgtcagctgatggagacacaaaaatccaataaagtaggtatagctgggggaggttccaagatggccaaataggaacagctccagtctactgctcccagcatgagtgatgcagaagacgggtgatttctgcatttccaactgagctttgaaaagagtagtggatctcccagcatgaagtttgagatctgagaatggacacactgcttcctcaagcgggtccctgacccccgagtagcctaactgggaggcacctcccagtaggggccaactgacacctcatacagccagatgcccctctgagatgaagcttccagaggaaggatcaggtagctacatttgccgttctgcaatatttgcggttcggcagcctctgctggtgatacccaggcaaacagggtctggagtggacctccagcaaactcgaacagacccacagctgagggtcctgactgttagaaggaaaactaacaaacagaaagggcatccacaccaaaaccccatatgtacgtcaccatcatcaaagaccaaaggtagataaaaccacaaagatggggagaaaccagagcagaaaagctgaaagttctaaaaatcagagctcctcttctcctccaaaggaatgcagctcctcaccagcaacggaacaaagctggacagagaatgactttgacaagctgagagaagaaggcttcagacgatgggtaataaacttttccgagctaaaggaggatgttcaaacccatcgcaaagaagctaaaaaccttgaaaaaagattagacaaatggctaactagaataaccagcatagagaagaccttaaatgacctgatggagctgaaaaccatggcatgagaactacatgatgcattcacaagtttcagtagccaattccatcaactggaagaaagggtatcagtgattgaagatgaaatgaatgaaatgaatgaaatgaagcaagaagagaagtttagagaaaaaagagtaaaaataaatgaacaaagcctccaagaaatatgggactatgtgaaaagaccaaatctacatctgattggtgtacctgaaagtgatgggagaatggaaccaagttggaaaacactctgcaggatattatccaggagaaattccccaacctagcaaggcaggccaacattcaaattccagaaatacagagaatgccacgaagatactcctcaagaagagcaactccaagacacataattgtcagattcaccaaagttgaaatgaaggaaaaaatgttaagggcagccagagagaaaggtcgggttacccacaaagggaagcccatcagacttacagctgatctctcagcagaaactctataagccagaagagagtgggggccaatattcaacattcttaaaggaaagaattttcaactcagaatttcatacccagccaaactaagcttcacaggtgaaggagaaataaaatcctttacagacaagcaaatgctgagattttgtcaccaccaggcctgccttacaagagctcctgaaggaagcactaaacatggaaaggaacaaccagtaccagctactgcaaaaacatgccaaattgtaaagaccatcaaggctaggaagaaactgcatcaactaatgggcaaaataaccagctaacatcataaagacaggatcaaattcccacataacaatattaaccttatatgtaaatgggctaaatgttccaattaaaaaacacagactagcaaattggataaagagtcaagacccatcagtgcgctgtattcaggagacccatctcacatgcagagagacacataggctcaaaataaagggatggaggaagatctaccaagcaaatagaaaacaaaaaaaagcaggggttgcaatcctagtctctgataaaacagactttaaaccaacaaagatcagaagagacaaagaaggccattacaaaatggtaaagggatcaattcaacaagaagagctaactatcctaaatatatatgcacccaatacaggagcacccagattcataaagcaagtccttagagacctactaagagacttagacttctacacaataataatgggagactttaacaccccactgtcaacattagacagatcaacgagacagaaaattaacaaggatatccaggaattgaactcagctctgcaacaagcggacctaatagacatctacagaactctccaccccaaatcaacagaacatacattcttctcagcaccacatcacagttattccaaaactgaccacatagttggaagtaaagcactcctcagcaaatgtaatagaacagaaattataacaaattttctctcagaccacagtgcaaagtagaagttgggattaagaaactcattcaaaaccactcaactacatggaaactgaacaacctgctcctgaatgactactgggtacataatgcgatgaaggcagaaataaagatgttctttgaaaccaatgagaacaaagacacaacatactagaatctctgtgacacatttaaagcagtgtgtagagggaaatttatagcactaagtgcccacaagagaaagcaggaaagatctaaaattgacaccctaacatcacaattaaacgaactagaaaagcaagagcaaatacattcaaaagctagcagaaggcaagaaataactaagatcagagcagaactgaaggagatagagacacaaaaaaaccttcaaaaaaatcaatgagtccaggagctggttttttgaaaagatcaacaaaattgatagaccactagcaagactaataaagaagaaatgagagaagaatcaaatagatgcaataaaaaatgataaaggggataccaccaccaatcccccagagatacaaactaccatcagagaataacacctctacacaaataaactagaaaatctagaagaaatggataaattcctggacacatgcaccctcccaagactaaatcaggaagaagttgaatccctgaatagaccaataacaggttctgaaattaaggcaataattaagagcctaccaaccaaaaaaagtccaggaccagacagattcacagctgaattctaccagaggtacaaagaggagttggtaacattccttctgaaactattccaatcaatagaaaaagagggaatcctccctaactcatttgatgaggccagcatcatcctgataccaatgcctggcggagacacaacaaaaaaaagagaattttagaccaacatccatgatgaacatcgatgcaaaaatccttaataaaatactggcaaaccaaatccagcagcacatcaaaaagcttgtccaccctaatcaagtgggcttcatccctgggatgcaaggctgcttcaacatatgcaaatcaataaacgtaatccatcatataaacagaaccaaagacaaaaaccacatgattatctcaatagatgcagaaaaggcctttgacaaaattcaacaggacttcatgctaaaaactctcaataaattcggtattgatgggatgtatctcaaaatagtaagagctatttatgacaaacccacagccaatatcatactgaatgggcaaaaactggaagcattccctttgaacactggcacaagacagggatgccttctctcaccgctcctattcaacatagtgttgaaagttctggccagggcaatcaggcaggagaaagaaacaaagggtattcaattaggaaaagaggaagtcaaattgtccctgtttgcagatgacatgattatatatttagaaaaccccatcatctcagcccaaaatctccttaagctgataaacaacttcagcaaagtctcaagatacaaaaccaatgtgcaaaaatcacaagcattcctatacaccaataacagacaaacagccaaatcatgagtgaacacccattcacaattacttcaaagagaataaaataccaaggaatccaacttacaagggatgtgaaggaccttttcagggagaattacaaaccactgctcaacaaaataaaagaggacacaaagcttatagataggaagaatcaatatcatgaaaatggccatactgcccaaggtaatttatagattcaatgccatccccatcaatctaccaatgactttcttcacagaattggaaaaactactttaaagttcatatggaaccaaaaaagagcccgcattgccaagacaatcctaagcaaaaagaacaaagctggaggcatcatgctacctgacttcaaactatactacaaggctacagtaaccaaaatagcatggtactggtacaagaacagagatataggccaatggaacagaatagagccctcagaaataataccacatgtctacaaccatctgatctttgacaaacctgacaaaaacaagaaatggggaaaggattccctatttaataaatggtgctgggaaaactggctagccatatgtagaaagctgaaactggatcccttccttacactttatacaaaaattaattcaagacggattaaagacttacatgttagtcctaaaaccataaaaaccctagaagaaaacctaagcaataccattcaggacataggcatgggcaaggacttcatgtctgaaacaccaaaagcaatggcaacaagagccaaaattgacaaatgggatctaattaaactaaagagcttctgcacagcaaaagaaactaccatcagagtgaacaggcaacctacagaatgggagaaaatttttgctatctatccatctgacaaagggctaatatccagaatctacaaagaacttaaacaaatttacaagaaaaaatcaaacaaccccatcaaaaagtgggtgaagtatatgaacagacacttctcaaaagaagacatttatgcagccaacagacacgtgaaaaaatgctcatcatgactggccatcagagaaatgcaaatcaaaaccacaatgagataccatctcacaccagttagaatggcaatcattaaaaagtcaggaaacaacaggtgctggagaggatgtgaagaaataggaacacttttacactgttggtgggactgtaaagtagttcaaccattgtggaagacagtgtggcaattcctcaaaggtctagaactagaaataccatttgacccagccatcccattactggatatatatccaaaggattataaatcatgctgctataaagacacattcacatgtatgtttactgcagcactattcaggatagcaaagacttggaaccaacccaaatgtccaccaatgatagactggattaagaaaatgtggcacatacacaccatggaatactatgcagccataaaaaaggatgagttcatcatgtcctttgtagggacatggatgaaactggaagccatcattctgagcaaactgttgcaaggacagaaaaccaaacaccgcatgttctcactcataggtgggaattgaacaatgagaacacttggacacaggatgggggaacatcacacactggggcctgttgtggggtgaggggagtgggagggatagcattaggagatatacctaatgtaaatgacgagttaatgggtgcagcacaccaacatggcacatgtatacatatgtaacaaacctgcacattgtgcacatgtaccctagaacttaaagtgtaataaaaaaattaaaaaagtagatagtcccaaccgctgtattctttttgaatccttttgccactgtttcatatcacagtttttttttttttctgagccctagattatcagtctgttctttttttttttttttttttttaatgtagtccataggaatctgctgcctcacggtcagtatcgtgccccttaccccaattctaatatgacaggtttttgtctaagacagcatttcctagaatgtgttgtaatgtacagcagcttcatgtgataattctcaaagactcccactgtcaaatgttagcatattcaaggctctgccaggacctgtaatacatattctttctttattctgtttaacttagcatttctgaaacctatcttactactgaactcttgacatttattaacaaacaaatacaaacgaaaataccagggttccaagtaaaattcttatataaagcaaagggctttaaacatcagagttttttagaatggttattcactcatgcactcaacaaacacttattacatagtatgtgccagcataggggatacagtaataaacaaaacagacaagttccctgttcatgtaaaccttggacttatggggcaaaaagacaataaacaagcagacaaaaaaaaattacaaacactctcaatgaaggaaaagagggtaacatcgtacattgatgggggactataaaattaagtagtaaggaaaagctgcacttgagaaggtggtatttgggaagagactcgaatgcctagaataagccaaccagatttggggcacagcactctcaacaaaggctgagtaacacagccagtctgagggaggacaggtctacggaatgagagccgaggcaagtcaaggcaacatcacgtgggtcctgagggtatgagccttccagagggtgtgaggataccattagaaggttctgagcagggaatgataggatgtgatttacattttgtaaagctgtctctgtagaggatagtttgtaaaagtgcttgaggcaaaactgacaagacttgaagacttgcacaacagaactgaagaaatgagaagaatcaactcctagacttctgggatgatcaatgtctaggatggacattggtgccatttgcaagatggagaagaccgggggaggtacggatttaaaggagggtatgtaaggagaaagaagaatcctatgagacaagaccagaacatgtaaatacatgaagttttggatttcttactcttcaaagacattttacctcctgtccccgaagttcttcacagagttcaggataagaaaagctgccagacagttgagttttgaataagtagtaactttcaaacacttgaaagacattatattagaatagactacatccatcaaaatacttaaaaatgtttttagaatagtccaataatttggaatatgaaagcctaagaaacttccttatccaaggccgcataatataaccaaaattagaatttagtactcctagttggcaatatttttatgaaattactgttttactaagacattttagaaatgaagactttactgaaggcaataataagtgcaattaaaagtggtacaataataagacttctttttcatttgcaacaggttagtagtgtatgagaattatgagatgtaaaatagtgtagagcataggcttctctagttggcttcatgtgagttcgaatcttggccctgcctctcttaccagcaatgaaatatgcagcattttacttaaggatactgggttgtatggagagaatcagagttaaggttggtgatccagcagtgtcatgtgtcaggagctaataaattgtattgtgaccagaaacactgaaacttgttataaggaaagcaatctaattaaaacagctgcattaaaatttctacaatatcttcctaacagcttatgctatcaacagtttgtaaactatcagaatcacggatactggctgagaatgcttttggagatttcaaattggcataattttctcagaatgcactgatctgacaaatgtacagacaggcagacaggaatactaccactcttcatgaataactgtctgcctctcctggatttcttccatgttgtgtaagtctattacactttgggtgaatgtagctttagtacattgagttaatatcattcttgcaaagaagctctttataaattccttaaacttaatttgactctggacacaaacaaatgagaacaaaatacagctcaaggattaagatccttaaccaaatatgtaaaaaacacgaaaagccttacaaacagtgatcaacagttaaacatgcgctatcaccttcccctaacagctagggaagcatgtatatgaatggaacatatgaacttccatttggtgtactaagaaaacacatcacgcagatggcttttatagcttcccaaataaggttctaataattcacaaaagtgttgttccctaaaacccataataaacaataataaaacctaatgtttattgagggtctactatgtgtcaaggagagtcctatgtactctcctggaattacttcatttatttctaataataacctttaatgagcactgtcactcccgtttcacagatgagccttaaggtcttagctatcaactttgcagacaacacccaagtaaaatcctgccccctctttttttttttttttttaaccagaaatccagtcctgacaactgaaagcttatagggcatttccgcttagatacatagccttacctaaattatatgtctaaaaacttaactgtcatattgtccagccctcccccaatacccaactggcttctcttcatgattttccaactataattctgtccattattcaggtttagaatttcatgctttcttctggctgtggtcctgccaagtcttatgtatgctgtcacccttctctgtgcaatctttctcctactcattcctctcttttcatcactatcctatttcaggcccttatcactcttacacctaattccctaacggtttcttcttgctttcagtacaatttccccttgatataatctatcctgcacactaccaccagatataaccttctaaagtcaccttattttagtttcttcataatattttccttatagtcaaatgtaagggttcttcatgaattataggacaatgtgcaaatggcttgacctggcatttaagacagtctgcagtatggcctcaatctacatttctcacacctgccactggtcctataatcacatcctctgttccagagaggctcactcctccagaatgcccactaccctcctctccagcaaacatacaataaagcgaatccacatgaataccccatcctaccctgccttatccagcccctggaataccacctcttccctattagatgcctatataaatcctcagtattcaagatccagcttaaggagcactttttctgggaccaatcattctggtcctctgtattgaatactcgaactcctctacaggacaggaacataatgtattattaccctatcattcattaacacacaacaggcttacattatatggctggttgtattttcagaggtatgtctatatgtttcgctatctatctatctatctatctatctatctatctatctatctatgtgtttgaatacagatacataaaaatctcatttcacctataagaacctctggagcagatacatgtcatacaataattgggctaaaacaaaaatccctcagtgaaaacctaaagactgggttgtggttgtttgcagccaaaacgtacaaaatgaaaacctcctaacgatttattttccacatgaaattagtaccagatctagagaaaaatggacaaggatcaaatacaaataataaagtcatcaccaaactaaaaatttcattcaaaagtgatgatgttggccgggtgtggtgactcacacctgtaatcccagcactttggaaagctgaggtgggcagatcacttgaggccaggagtttgagaccagcctggccaacatggtgaaaccccatctctactaaaaacacaaaaaacagctgggcgtggtcatgcacctgttatacccactactcaggaggctgaggcaggagaatcacttgaatccaggaggtggaggtggcagtgagccgagattgtgctactgcactccagcttgggcaacagagcaagactccgtctcagaaaattaaaaaaaaaaaagtgatgatgtcagtaaagacccaaatcagggtcatatgtttaacaccagaaagtttgtatttgctacaagacagaaaccttgacaaaataacttttctgtgctttgttacttcatctgaatgaagaaggtaaaccagttgatctcacaaatctctttctaagggcttctggaatttttttttttttttaaacaataaaaggaaagagacttctcttaagcagaacaaagtccgactcctctgtaaagtggctgacagcaagtggaaaatggaagaagaacaattacctgcaaaatgactcattcccttgtaacaactacactactagggaattccttctcttaccggctgtggctagcgtcagactcatgacaaagacctcatcctggggctagaactaggtttagggttttctcattcattcctctgtttctcagctgcattttcatttttaatctgtgcaatgattacagaggcctatgtttggttttcatttctagtttccccaggaagagacaactactatcttgatattgattaacacttgaaacttctgttaatcacaatttcagtatttcagggaatcagagaaatcatttggaagagccttgaaggtcatccagggtgagagaaaagcaaagcacaagcaacagaccaatgtttagacacagtgaagtgaagacctacaggagaccctctcaacttcaataagagtcttttttatggctgtcttcatattctttcaaagaaatcataataaaggagttagtgagagtgtaaataaaaaataggctatcatagagtgctgggtaactgagctaaaactaaagtaaacaaactcagtgggccatcacatatgcaagctggtaaggtctcataaatcaccatgactgggtattgggatttcaaaggcacactctgtaagctttctcccagccctgttgattcaagctccaattgcactgggttacttatatggcagcatataaagttgaccttttatgtttaaaaatagttccattcctcatccctcctaaggataggccacagtacctatcatatgtccccaccacactacataatttatgtaagttttcacttaattttcaacacaatcctttgaggtagattatgttagtcctgatttacagggaaaacagaggctcagggaggccaaatttatttatttatccaaggttgcaactctactgtagggcagatttatatccagaagaggaattgcaaagctcctcagaatttaggagatttaaaatggaatcaagataaaggttcacatttttcatcttctattccattttactcttccagcatctaataataacctatgatatattagaacaaatcagcccatacttattttgacagtctcttttcaccccatttcagtttgtaccttgctgtctcagagcccatcaaccacctttcctcactcccaggcagccggtccttcaggggatggcttggcagttggcccaccatcctctgctaccagggcatgactcatggaggcaacaggtgaagctgacgccaactattagtgctaaaaaagactcaagcctcatgaaatataccatccataaatcgctctccagtcagctctacccctccctccatttctacagctgactgtctgttcttccttaaacatttacatccgccactgacctgtctgggatttcttttttacttcaaggttctcctaaaggttcagtccaaccaggtttcaccaaatgaaccctgcggtggaaaggggcagcaacgggcattggtcagtttgcctccagccaaggaaagtctgactcccctccttctcccactcttctctttctctgcctcacactgcctaatacgtctttcctctttctctctttctttccttatatcttcattttccaccctattcagaagtgaaacttcccttgccactttgcccccactaagaaaacagacctccaacacaacctcttaacaggctaattttaaaatcatgaacctgcttacaccttccgtgagtttatcctatatcttctctatctgctgtctgcttcccactaaggttttatccctccatcccacctccaaatcctttacagctcagattctcagatctgctttagtcacttggtctcctcatcccactgaccctattatccttctgtgcacatgttagagggcacatgctcctcctaggaactagggccaggtcagttatgctcccatcctgacatgacctagagaacaaaaaaggcaaaacgaggtactgtaggattcctctctaggaattatactttgctgaaattgctcttgctattttggaatctagtgctcactaaatacatttttaaaatattatttggatatattttgaaaatacaaccagaggtcgggcacagtggcttacgcctgtaatcccaacactttggcgggccaaggtgggcagattacgaggtcaggagttcgagaccagcctggccaacatagtgaaaccctgtctctactaaaaatacaaaaaattagccaggcgtggtggcaggcgcctgtaatcccagctgcttgggaagctgaggcaggagaattgcttgaacctgggaggagaaggttgcagtgagcctagatcacgccattgcactccagtccaggcaacagtgcaagactctaactcaaggaaaaaaaaaaaagagagagagagagaaaatacaaccagagaataaacacttgttcttctatctctccatcttccccaccaatacaacatccagaaaatagtcatctttacacttatttagaagcacatagatcttataaaagtttaactgagcattaggttttcatctttaaaaatattctgaggctgggtgcactggctcatgcactttgggaggccaaggcaggaggatcacttgagcccaggagtttgagaccagcctgggtaacatagtgagaccctgtctctacaaaaaaaaaaaaaaaaagttaaattaaattaaaaaacagaaaagccggtctggtggcacatgcctgtggctccatccactcaggaggctgaggtgggaggatggcttgagccagggagatcaaggctgcagtaagccatgatggcgccactgcactccagcctggttgacaaggtgagaacttgtctccaaaaacaaaacaaaacaaaaaacgttttgacatgtagaatactgtttctgggactaaattagagatttaaggtttgaggtatgagaaaatacctggaatcatgccttacattagaaggtaaggtaaatactggtgtttcccaatgagttgtagtcagattgttcatatgtatcaaacagacaatatactgaaatatttaaaaataaggctaaatagcaacaaataatttttcccatgaattctactttttttttttttttttttgagatggagtctcactcagtcgcccagactggagtgcagtggcgccatctccattcactgcaacctctacctcctgggttcaagtgattctcctgctcagcctcccgagtagctgagataacagacatgcaccaccacacctggctaatttttgtatttttagtacaggccaggttttgccatgttggccaggctggtctcaaacttctggcctcatgtgatcgacctcccaaagtgctgggattacaggtgtgagccaccatgcccagctgaattctacttttttttttttttttttgagacagagtcttgctctgtcacccaggctggagtgcagtggcacgatcttggctcactgcaacctctgcctcctgggttcaagtgattctcctgctcagcctcccgagtagctgagattacagacatgcaccatcacacctggctaatttttgtatttttaggagagacgggatttcaccatgttggccagctagtctctaactcctgaccgcgtgatctgctctcctctgcctcccaaagtgctgggattacaggcttgaggcaccacgcccggctgctgaaattctacttttgaaagaacaaattccccttctgtagggactgatgattcagtctgtaatgatgcattctcttcatcttctttttttgtcttttcttctatatatcctttaggcattctactgtattaacactagatagaaaaattaagatttaggcccaaacattatcttctggcataaagtaaactaatcgtttcctgatgtacaataaataaacagacatatttctagtagaagattccttatgatttatcaaaacccaattatcacttacccttatggagatcttagatcttagaaaccatactgacaatataagattaagaaaacaacagaaaatcaaaatatataccaaggataatgttaataggtttcatccttatcacagcatactgttgaaacttacttgaaatatttttttaaaaaagatacaagaggacaagtgtttagtttttaacaagggaggggactagtcaacaaatattgattacctaatttatgaacagctctggccaaagtggtcaaaaaaaaaaaattaggactttagttttcctaaacctatcttaatttttaacaggattatagctttgttcaatctttacagtctttagcctcttttgtgaaatgggtttccttgtaaataataaaatgacacctatatatatttaaagcactcatgaaataattttatctctttattaaaaactgtgataacccttccaattttgaaatttattgtcttcctaaattcttgctacaaagcctatcattaatattgcagttcattttttccctaaagattgaaaaaaacactaacaaatataaagtctttatggtcaaagaatgtactccttttataaaacttggagttgatgtaaaggcacagacaacacaagttaccttaataataaatgcacttttctttgtaattttgggtaattcagtgtgatttgtaattcttttaaaagacacacaatcacttgtatttttgcatggttctttttttcctaatttcccactatagtgaaatatctgtttttccttctctattgggtttggattggaatgatcaggtagaattaaatgtaaaataacaaaaggaaaatactttatagatcttctcaaaatactttgaagggtataatctctttaagatggctttattcatatttaagccaaaaacaaaaagcaaccaaaacactactgtttatacaaaaagcagcttcaaaatcagccagttattttctgaaatggagatggcagacattagcctgcacttactccaatatggcagccgcatctttgcctctttgctatggacacatccccagcaggcctgtactttctactctccagacctgtttatgacaggccaaggtgtttcctattatggtgcctatggctgcacagtgcactgcttgtcagtaataaaagccagaggctgtccctatagggattacagtgcagcagaccagagatgctgatgggaatgcaagcatgccctaggcaaacattgcagaatactctctgacaggcaaaagccaacaaacacatcctttcttcccagactagcagggaaagtattcagttatgtcattttcacttggaacaaactaataagaagaatgttattgctaaaataggtagagatgagaaagagcagtttatgaccatgaatatggcctctatggtttttgcctgtgcactacaaacttttaatttaaacgagatgagattgatctagcatatactatgataaaatttctgagacatgagtatctaaaagcagaactgagattaagtgagaaatgctcaggattcctgtcactgaaagaaaaagaaaaaaacctttcttgaaaggcacaaagtagaatgctcagactctccatctaccaatacaaggtaaaaaacagcatttgcattaaccaacatcatgcattcttgtactaatttatgtgactaactacaaaatgttatattgacactcactgtgtagggtgtcaggatggccaagtggtctaaggcaccagacactcactgggttgggctaaaaacaccgtagaagacctcatcagaacaataaaacagagacacaaaatattgtactaagagttaagagaattacaaataaaagttctgtggaaagtcaaaggtatccaattaggaaagcctgaggtgggagacataggacaccccagatataggatgggaagaagatgggattaaaaaaaaaggctttataaaggatgtaacattccagataggccttaaaagatggcttcgatcttttaaataaaactttttgttttagaacagatctagatttacagaaaacttgtgtagacattacagataattcctatatactctacactgtttcccatttttaatgtctgactttagtatggcacatttgtcacaattattgaaccaatactgatacattattattaaacaaagtccacacttcattcagatttccttagttttcacgtaatttccttttttctgttctggatcccatccaggataccacataatatttagtcctcatgtctcctgaggctcttcttggctgtaggtatctcaggttttccttgtttttgataaccttgacagttttgaggagtactggtcaaatactggtcaagtttcgagggtagaatatccctcaactgagatctgtctggtatttgcctcatgattacactggggttatatgttttcagtagggaaaccacagattaaaagtgccattttcatcagatcatatcgagggtacatgttatcacttatcactgtcaatgttgaccttgataacctggctgaagtagtgataggtttctccactacagtttcttttttttccctttctacactgtactgtttagaaggaagtcaatatgcacagctcacacttacggtgtagggggttatgttctccctccttgagagtagagtatctatagaagttattgggaattccgcacaggaggagatttgtctattttcccccacttaggtatttatttaataaattgtatcaatatgggtttatggatatttattttaccctttgggatataatccaatactatattattttcttgctcaaattgttctagctttggccattgggagctctttcagtttgctcttgcaactcttcagtatattcccacgggtgtagggttccatttgtttgagcaggtccttactttttggcactacaagatgctccaggctcatcttacatatttccttcctgagtccctagaaatcagctattttttttcaaagagtcttggttccttttaccagagaatggtattagaaaccaaaatgagggtgctaagtgtgctcattgctactggggtatggtagcttctagaccctctcggctgatagagcaaggaaatatttgtgtgtatactagatggtaagatgttgagaggtagaatggagagttaccttcttaatatacttttcttaatattaaatattaataagatattgtgtgcctgggttactttcagtcttatgcagaggaagaacgtatgtacattcatttatgaaaaacactggctagactattcttctgcactgcattatgcatttctgctagaaaaagctcagagattttcagatattctgacaaaaatctcaggcttgcttgatgagctatactgtaaaattacagaaggaaacaaagggcaaactccttgaaggatgaaaataaaggaataaaacatataaaacaccaccaaaaaaagtgattaatgggggagaagagtaaataaaacattataatagtcctctttggttagtatcaatattattaggtcactttatcaaaaggatagaaatcaggatggcagacacccttctctaaccctcaccccccaaaataataaaataaaaactaatgttattccttcacatatggaaatgaatgagttctactgagtatctagtatgattcctgactcagtcgagacaattcccatcttttaattcattaaatcaccacagcaactatttaacagatgagaaaactgaagcacagaaggcaacgtggcccaatttacgtttggtaaaaggcagagaatgaatccaattcaggcaggctgtctatagtagggtgctctaaatccacggaccattctgcctaaggaatgaatattttatgaattggaatatttctgctgaacgaatttgccattttctcctctagtggagaaatccaactgagggtaaagaaggaaaaatgttgattgtttaaaacaataaattagtctctaaattgttcttgcagctgatttagactagtgtgtccaaaagtatgcccagtgttagtaaatggtaggcaaaatgctttaaggtggtgcaagatgaatgttttctcattttgttattcattaattttagaaaaaatacagaaaaaatataacttgaacatcaaacctatgatttcatgtataccattacttaagatgaggcacttgggtgagtatttagatttaacaataagttgctcttagcatttctatactttgacaataaattatccaaaaaagaaattaagaaaataatcccatttgcaatagcatcaaaaaaatacttaggagcagccaggcgtggtggctcactcctgtaatcccagcactttgggaggccgaggcgggcagatcatgaggtcaggagatcgagaccatcctggctaacacagtgaaaccccatctctacttaaaaatacaaaaaaaaaaaaaggcaggtgtggtggcaggcgcctgtagtcccagctaattgggaggctgaggcaggagaacggcgtgaacctgggaggtggagcttgcagtaagccgagatcgcgccactgcactctagcctgggcaacagagcgagactccatcacaaaaaaaaaaaaaaaaaaaaacttaggagcaaatctaaccaacaaggtgaaagatctatacactggaaactacaagacattgatttaaacaactgaagaagacagaaataaatgaaaagatatcccatgttcatgcactgaaagaattagtaatgttaaaatgtccacactatccaaagccatctatagattcaatgcagttcctctattgattcaatgcaattcctttcaaaattccaatgtctttttttttcacagaaatagagaaaaaaatcttaaaatttatatgaaccaaaaaaagacctaatagccaaagcaatcttgaacaaaaagaacaaagctgcaggcatcatattccctcatttcaaaatatattataaagctactgtaatcaaaacagcatgttattgacataaaaacaaacatcaaccaatggaacaggatagaaagcccagaagtaaatccaagtatttacagtcaattgatttttgacaaagggtccaagaacacacaatggagagaggacagtctcttcaaatagtgttgggaaaactggatgtccacctgcagaagaaagaaactgtactcttatctcacactccatataaaaatcaactcaaaagagatataaaggcttaaacataagacctgaaactgtaaagctactagaagaaaatataagggaaaatctccacaacaatggtctgggcaatgatttcttggataggactccaaaagcacaggcaactaaaacaaaaatagacaaataggactacattaaactaaaaagtacctgcacaagcaaccaaataatagagtgaaaagacaacccatggatcaggagaaaatatctgcaaaccatacatctgataagaggctaatattcaaaatatataaaaaattcaaacaaccaaatagtaagaaaacaaatcgattaaaattagacaaaggatctgaatagacacactttcctcaaaaaagaaatatgaatggccaacagagatacaaaaaaaaaaaaaaaaaaaaaaaacaatgttccccagccctgcacagtggctcatgcctgtaatcccagtgctttgggaggctgaggcaggagatcacttgaggccaggaattctagacaagcctgggcaaaatagcaagaccctctctatacgaaaaaataaaaagccaggtatggtggcacacacctgtagtcctggctacttgggaggctgaggcaggatcattgagcccgagaatttgaggttacagtgagacatgatcacgccactgcactccagcctgaacaaaagagcaagaccctgtctcaaaaacaaacgaaaactcaacaatatctctaattctcagggaaatgcaattaaaaccacaatgagctatcacctcatgcctgttagaatgactattttccttttttttctcttcaacttttaagttcaggggtacatgtgcaggatgtgcaggatgtgcaggtttgttacataggtaaacatgtgccatgtttgcttcacgtatcatcccatcacctaggcactaagcccagcatccactagccattcttcctgatgctctccctgcacccatcccacccgccaacagaccccagtatgtgttgctctccaccatgtacaatggctatgttcaaacagatgaatgataacaagtgttggcaaggatgtggagaaaagggagcccttctacactgttggtgggaatgtaaattagaaccaccattattgaaaatagtatgaaggttcctcaaaaatctaaaaatagaactaccataaaatccaacaatcctacttctaggtatacacccaaaggaactgaaattggtacatcaaaaagatatttgcactcccatattcatttcagctttatttacaacagccaagatatggaagcaatctaagtgttcatcaagtgtgcataaagaaaatgtgatatatatatatatatatatatatatatattatatatatatatatatatatatagattatacaggccgggcgcagtggctcagatctgtaatcccagcactttgggaggccgaggcgggccgatcacaaggtcaggagatcgagaccatcctggctaacatagtaaaaccccatctctacttaaaaatacaaaaaattagtggggcgtggtagcgggcgcctgtagtcccagctactcaggaggctgaggcaggagaatggcatgaacctgggaggcggagcttgcagtgagccgagatcacaccactgcactccagcctgggctacaaagcgagactccacctcaaaaaaaaaaaaaaaaaaaaaaaaaaaagattacacagccttataaaagaaagaaattctgtcattcacaacatcatggaatggaactacaggacattatgctaagtgagataagtcaggcacagaaagacaaatattgtctttaataaatgatctcactttatggggaatctagaaaagtcgatctcagaaacagagagtagaaaggtgggttaccagaggctgtagaggaggagggagagagaaatggaagatgtcgatcaaacagtacaaaatttcagttagattggaggaataagttttagtgatctattgcactgcatggagaccccagtaattaataacgtattatatgttttacaatttctaaaatagatttttgacattctcatcacaaaaagataaattggtgaggtaatatagatatgttaattagctttactaaatctttctatgatgtacacattttaaaaatcacattatacccaagaaatagatacaattaatatttgtcaattaagaataattgacaaataaattttaaagattaataaaaaatacattaagttaaaacattcaacatataatagcagatatgaatgtacacagaaatgacaaaatcccagcactgtgggaggccgaggagggaggatcacgaggtcaagagatcgagaccatcctggccaacatggtgaaaccccatctctactcaaaatacaaaaattagctgggcatggtggcatgcgcctgtagtccagctactcgggaggctgaggcaggagaattgcttgaacttgggaggcggaggttgcagtgagctgagatcgtatcactgtactccagcctggcgacagagcgagactctgtctcaaaaatgacaaagtttgagcaacattaatttggactgtaaattcttaaagaatagaaaagtcatgtttttcttctaagaaatattatgtttttacattgcaagaaatatgtgacacagagtttttcttaatctctcttttttagtatattctagacaggcaagcacatgcaatttattgagcacccagtgtgtgctaatgcaccaaacggagctttacatacattatagctaatggtctcaataactttttcattttattttcccctttcattatcgccacttataaatgaaaaaactgagctccagagcggtaaggcctattgcccaaaatattagataggaaacaacagagctggaatttgaaaccaagtttgcctaatgaaaaacatttatgttcttttcactgtacaaagctgctgtaagtatcactggtgcctactccaggccagggagtaaatatcattcatccttatcacatacaaagtataacaaaacaaaaacaagaagctctgaatactaaataataataataaatactttataaaagataaactattctctaagagtaaaagataataaacctattgtcattgtagttggtcactgaacttaactaatttcctaatggacgcagcagaattgtttgttgtttaagcaaatatcaaggcataccccccaatccctgttacagggaataaaaaaagtcttcttcaaatgcctttcaaaactaatgtgaatattaaaataaagtgctactgatctctctacattctagaaagatctcagactaacagtgtcaattaaactattacaacaaatagccatgtaaaaactgctcccctactagagctacgctatcacaaaattaaccccagcaatctacagttctagaaaaagagttggtccctcctgctgaaaaagagaaaaccaaaccctacatattttgtgaatccactgaaaataatgacataaacagcactgcacatccatcatgtatttatatcttaagtgatagctacagtctatgtaactatcgcagaaatcttcttaaactgaacaaaagcattatctatcatcctttctctctagaaaaataccagtttgtttaatctacccataacattagaaaaaatacttcttttatcatgggcaatccttatgtttcggaatttttttcgaaaacgtagacagttcataatgctctcagacagaagttaccactactaccccaaatattaagtcaaaatgtaactgaaaaaaagaaatttatctagtaatgattaatttattgaataattaaaaattaggagtttttgataattaaatgttgggaataattaaactttcactaaatactggcacaggaactgaacggatgacaacagagacaagttaagatttgttttaatcctaagttttatgctaaggtaacatcaagggctctacttttcagtgaaagaaaaatttcctttaaaattgtttccctcttccattattacttaaaagcaaagaaagtattttttctaacagtgattataggattctcaatctttcatattaactttaaggtactacatgtaagctacataaatctttcccaaatctacctttattgagtagatgaaaaagcagatatcgaactcaaaacatctaaatgttgattttctataattatagaagatattttcttttgaaatttaaagtttgtatttaggcatattaacacttttttaatctaagatttaatatgttaatgtagaaaacaactgaggctgttttctctctataaaactaacatgccttttccaattaacttagtttccttcttagcaaaagtttaacatttatatctgttgagttacactgtagttgcataatgtggaaatatcttaagatttagccacttctatgaagatcctatatttgttataacacccctcttgcccagaagaaaatacatcaacaaaaagtcctactatatgttctgcattgactattacaaagcagtagggggagcagccagagaaagctctgagacaaagcacccagcaaagcaatttaatttataggcaacagaaacatgctagagaggtttgccaaaagccaaatacacaaaataaattccataaagaagtcatgaccacatttgtaaagctggcctaagtatatttggaatgaagtatagaaaaatctgaagtctcttagaaagggtctggattctaacttcaagacagactttcagcttgaaacacagtcatttccagccatgccaaacctcaaactgcccccaaaattagagcagaaacaaaatacatttttatagtgatatgtcttgggaataactcaaaatgatttcgttttctcctttgaacctcactgaacttacagggaaggcctggtgaaatgtgcattattaggtcacaagaggataacgttacagggttccatagcataatccttgaaagccctgaggcccaggccgctgtcctgctctcctctctactgactcccatcctcaatatactttccatgagagaaaggtaaccaaaaacatggtgaaactattctgcttaaaaggtgttttactgaaaaggcacattgaccactaacccttattacatttcacatgttctaaaaattagtaaggtctgcattttcagttttagagtaaaacaggaaaagtacttagttagctcttctgtctggcattctgtaactggaatttaagaaaagcctaaacttctaattagaacttcagaatgttcatgtctgtattataccacaaaaactgtaaatataatttaagcatttttatgatacagaaatgtgcgctatagacagttatctaagaattataaaaatccatcaaacttgaagtgtctggtataaattacaaccgaatggtaaaaagacattttagccacgtaggcaaccaatgaagtttgacctaaaacccaaataatagcaataacaacagatacagtgcctactattgtcagatactatattagctagctcttttgtatatattctttggaactcttacactgacttttcaagatagttattatggtgcccattgtatgctaaggaaactgaagctaaaaaaaattgaagtcatttctctaatgtaactccattagcaagaaacaaaaccataattcaacttccaggtttgcctgcctccaaagctttgagacctcactaaaattaccctcaattgtagcaatgaggttccaaaggaaatctgtacaaatctcaggcagattaatgtgcttataagggtaaatgccatagatttaatcactcaaattaaatgccatctggaatctcttaccctacttggtacaagcatcctacatgtgttacagccaaccctagccttggccaagaattcaataattttcctgcttcaatgccatcaacaagcaagaaacatatataataccaatacaggaaatacagctagttgctcctagagcatcatttaaaagctgctaattggctaagatgccttttattgagaagtctaagaaacagaaataatgtgttaacccagtttgttaaatgggtttgaggaatcagtttcctccttcctaatacctaaatccatctccataataagtattctctatcaccatttaaaaatcctgatctcttactagtgtttttattgtgcttttcaatctattagagtaaattttttaaaacctcaagagagaacacagaaaactgtcataatttttcaaaggctaaaggagaataaactgaaaatatcagtttgaacacgtgtatgtaaaaagaatggatggtaataaaactaacaactgaaaagcaatgtttctgactcattcattcatactcaagaaatatcaaataactgagtggagatgatgcaagctgtacacatttccagttcagactgaaggtgtggcaacactcacaggggccttccgatcagctgctccaactcagtttacagcttttgtggatgtggcttattcatgcccttgttatgaagaagaagggtaactttacaacctttagcaagagcttttttttctttctgtgctaacccttttttgtctataacagtcatgtaagcttagcactgatttagaaataaataagttaaagaagacacgaatggcttggacattaaaagtttaagcaacagcttaagctgagctaagtttaatgttaaaaattagtgtgacagcaataatttttcaattcagctctgtcgtgggctaggaaaaaatatcctaatttttcagccacaagacataaacattgctagaatgactacattttgaaaaaattatcttctcactttacctagatttcattttaaccaaacagaccaacctctcctattaaacctgtaaattaactcaaagtctaatctggggccttcataataaagattttttttttaaatccctgtcttatctggtgcctttaaaagaaaggaatcattttaggcaattattatgacctaaaaaatttttaaatcttaacgtatagattaattccttgacagctgaagtcatttacaatacattattaaatttcacattcagttttaaatccaaacatagatctcaacattaagaatatggattttagggaaagtaactagctgctcaaattcatttagctgaaaaactactgtcgaatcaccttgaaaatatacactaatgcttgcacattgctaagtggcttttgattctgctcttcattttcttacacagaatcaaccacacaatagaattaagaactcaggcccatggcaaagtgctcccatttagcagttaggacactggacatattcagcatatgtctactgctattgagaatcaaattatgaaaacaaactatattttataaaactaagaatttgttactcagatgagaataaaggtgcctaatgctacagcagggggtaaaagtcccagtaagagagcaataattggtcattctgatgaggagctgtgccaaatttagaaatgaggcacaaatgacaaaaaaattgatcatcagtgtggacatgggtaggtcagtgtgcatatgggtaggttagtatctgctggccgtgtctacagagccccttttatttatttgaagccaacttttcacttgacaatgctacctacaaaagcactgttaatagataagacaatcaagtggctgttatgccgtggcctttttgtaaaaactgcatgagaacaggtgggataaaaaccatagaaaggtagaaaaaaaaaagcatcactcatttaaagatatgtgcacatagatgaactgtaagataatataaccttcttgaccttgtaaataggtggccaaaaatacttaaatatcttgacgaggcaactattactaattgtctcacaacattaccagtccttactggctgaatccttcagccatctgcatacgacatgcacaggcaaatagccactaaaaacatacacaattccaattatctccttgcataactaaagacaaaaagaacaggaaatccaaaaaatacagcaaaactgaaaacactataccttgccttccgtgctattttaaggctgtcccaggctgaaggttacttctcagccctcaaaactccattaactgccaagaccagcaccttagcacatatggcacagatgcctagttgaagcctccttgtactaaatgacctcaaaaaactgggctttctttccaagattaatggaaacaaaagtaatgatcataaggaaccttctaactctgttaatgtttcctgcggatatgtatggccaactgaatatataaaggctcagttcttgcggggtaccctgacaactagatgaattagggtgaaggttccaagttcgatgaactcttctgagtttgagtgccctaggtggtgacattcaagtgatttcacagacatccaccaattcttattttcaaccgggaatcccaagaacacctttaaacatgcaatgcccatggaccctactgggtttctgctgcaagggctcagtgttacttaggaaccctgtgtcttgggagatacttaaatttagcacgtcaaattgcttttggaaaatgtttatctggcgtgactaggggaggcaaagcaaggaaacaggaacctccctctaaggagcagaatagccaacatgcagtaagcctaaaaaacctctcaatttatttcccggggctatgggtaccagtggctcgccggcatgggaatcagcagcctgggggcaccagtgacagcagaaccggggcttaccttgttggaggccatctcactgacggagtgcctggtctgtagggtctctagctggtccagacaccagtccagctcctccagggtctcgctggccagtttctggtaggcctcctctgcgaagagacagggaaagggggactcagttctcaagcgcttcacgggtccgctagcgagttcaaagggggccatcctgccataccccgccatgctcggatgcccggtgccggcacatgagggctgctccttcatattgcccagcccggcagtgcaacgggggcggaggctgtgctcgcggggcggccggcctcggggaggcacggtctctccagcttggcgtctcgggtcggcctccagggagggcgtgcaaagagcggcgagccaactttcacacagcgacgcgagcggaaaaaccactatgcgacttttcaactgtgcggcgggcccgagtcccagtccaggagcccggctctagcggatggcgagggggtggcgagcgcgcttgggtgcccgccccgcagaggagcgtctggtccacagccggatctcctcggtccccaacccggagccgcggccccacgcccgccccgcctgccgagccttctgcacggcacttgaagtgaatgaatcagccgcggccgggtgcgcggccaccacgtttcctgttttctttctcaactcctcgggcggcaggcgcagcgcggctccaacgccgcagctttccgggaacactccccctcacgcccctctcggccctcggcgctgcctggctcctcctcaacccccttacgaaaagattccgaattgcaaaagcctgtccctgtccgtgccacccgccgcgtccttcccctcgagctctgccccgggggccccgccacctcgcagtgccatccccccggcgcagccgggcgccactcgctttgaagtgcagacgaggaggcgcgggcgcgagcgtgtgtgtctgtggggctgctgtgggactgtctgtgctaggagagcggcggaaaacccggcgtggagcgcctgcagtccgccgtccggggtcgcgcccgccgcggggctcaggagggaccggcacgcaggcgcgcacggccgcgcacctgtctcgctagaaccccgcgcgccccgccgagccactgccctccaggttgcccagaccgctggagcctctgcgactccacgaccggctgcttcctgcgaagtttcacaaacaaggttatttaggaccctcaaggtttctgagggtttaagttttagggtttctgggggttcgtttctaaaggcttaggattcacctacttcaaggaggcagggttgtgggaattaagaccgcattctttttctacccagcccagtccctactaagtaccagacttctaaatgttggggcggacagaaacaagcaaacaaaatatacaatgttgtggggtcggaacgctttataattcacaaatttgacaataggctgcattttcatatgccgaattgcctaagagttctcttaaaggaacagcaatgtgaaagaaccacatggtaaggagaatttacgcatgtcctgcatactactcctttcccctgtgaattgcataagacctagatgatcttgggccaaggaagaaaatctggaagggtgtttctacccaccatgtgcagagtacactacaattttgagaaaacggaaagaccatattcaaaggcatacagaaaagcctgttctgtttacaaaggctgacccagggcaccagggacactgtccctaagcagatcagttgtgggagaacttttctacattagcatgcaataagcaaaccattcatagtgaggagaagtcaaactcccaagggtccatttgataaaactttgtcattgtcgagtggaaagaagatactgagaaacttacactaagtggtgggatcccttgtctttgtctttgaatctacaggtattggagaagaaattctgcccttgaaatttagactccataaattaacatggcacaacaaataaagttcatggactgaatttaggctcctgggatttttgagatagctttttatgtgaactttgtaaaagttagagtaacttttaaagtagttgttacatgtgccacgtggcttattgttatcaagaatacttgaactatttactgttcactttgagtactctaggttaaaatttgcctcttttttgttctacttcctccaccccgcagtctatgtaaatatatactttagatggacaaacaactgcctaaaccttgccaggtgaattaaagtttcagattgaagcttttttttcccccttaacaagcttaaagatattaataattttaaatggtaaatataaaatacctgctctgtatagcttccccaattctaagaatgtaaaaaatattacatgcttgttataaaaattgaagcattacacacaaatataggaagtccattgtaaccccacaccctaaagatcacaaacaatactttcgcctatggctctaacacaatcattttcattttactgaataacttccatatgcaagtatagcatcacctagttgccatggtagtgcatctactatatggtttggttttgatattttcctctctctctcattcccataatataggaatgtaggaaattttaagaggacattgacttgttttatgatcatttgagctgtccatagttagcctatccagtggattaaagatgcataaccattgtgtctgggatttgttcagtgccatcttttcaatcattggttacaatgaagctgggagtcccctctgaggttcggctttctgtggctcctctcccctgcactccaactttctcaaagcctgagcctcaagtgatttcccagtagctaagtaaactgcccccttcctccatcttcaccaagttcccaaagctgttcagactcaggcttcaaatctaacaggatgtggctccacacattatatttcagttgttattttttaatgtggaaaataattcaggaaagttttggctaatgcttcaagacatcatgcactttatacacaggatttgttcttaagaaggtagtatagtgacaggaggaacaatttacttcagaatatccattttatgtccaagccatgcaccagccacttttgacagacaggatttgagtatgatgataaaatggggtaagcatatattttaagttctaacatctgtataaataagaaaaatgaaaaatcactggaacacatctacatgctagtgagaaaataattactaacagagtaaagtttgctctgtgaaactgttgctcaaataaagaattattcttgatattagcatagagctgagaatattgcttttttccaaattcctaggtgagtaggcaatatagctagccacgatttttcaggatcatttgtaaagcttcacttttaggaattttaaccccaagtgttctaagacatcaagtaactgaccttttcatcccgccgaacaaacctcaaagtggagttgccaactatcccacaggaaattgagtcaccacaccaagcaacacacctaaatgtcgacagctagcaggacaaaaacagtgagccagtttaattttggcttttaccaagaacacatactgcattcattaataaaatacttcccctcaacccctgccagagtagtatacactgtggctctccttaaaaatacatgaaaactctttaactgcaccaaatcttgctaagtcaaggaactaaacagagaaaaacacccaagcaaaaactattggctaaactccctaaaggctgggagagggctatggaacagcaactgagaaataaattgagccttgaaggcccctgctacaacagcatcagttttcttcaaggcacctttgaactatgtaacacccgcattctgctgaggctcttctgtgaacaaacagtcctcaattcttgcgggccagcacttggcttctgtcacagtgatatgcttagaggttcccctgacacatggcctgaaactgtgccaggggctccaggagaagatgctgaagaagcagcttccttttgaaaaaggaaaaaagtaatcacctcagagccacagcagttagctagaggttgaggtcattttttgtgaaatgttcagtccattactcttacccacaactcacagtgatgttgaccattgaggtaaaaggatccactgtacgggatgtgtaactatgtggacattagtttctttgccaacacttgaaggtctgctaaaggactgtatcggcttgtcataattcctagatagacctattggtatacatgaagagaacaagtccaaaaaataccacttattttggacactatttgtatgcccttaatttaaaaaaaaaatacaaattataacagctgaggtcgggcacagtggctcacgcctgtaatcccagcactttgggaggccaaggcgggcagatcatgaagtcaagagatcaagaccatcctggctaacacagtgaaaccttggctctactaaaaatacaaaatactagccgtgcatggtggcgggcgcctgtagtcccagctactcgggaggctgaggcaggagaatggcgtgaacccggcaggcagaggttgcagtaagctgagattgggccactgcactccaacctggacaacagcagaagactccgactcaaaaaaacaaaaaaaattataacaactgatccagattttttttattattacactttaagttctagggtacatgtgcacaatgtgcaggttagtttcatatgtatacatgtgccatgttggtgtgctgcacccattaactcctcatttacattaggtatatctcctaatgctatccctcccccttccccccaccccacagcaggccccggtgtgtgatgttccccttcctatgtccatgtgttcgcattgttcaattcccacctatgagtgagaacatgcggtatttggttttttgtccttgtgatagtttgctgagaatgatggtttccaatttcatccatgttcctacaaaggacatgaactcatcctttttcatggctgcatagtattccatggtgtatatgtgccacattttcttaatccagtctatcattgatggacatttgggttggttccaagtctttgctattgtgaatagtgccacaataaacatacgtgtgcatgtgtctttatagcagcatgatttataatcctttgggtatatacccagtaatgggatggctgggtcaaatggtatttctagttctagacccttgaggaatcgccacactgtcttccacaatggttgaactagtttacagtcccaccaacagtgtaaaagtgttcctatttcttcacatcctctccagcacctgttgtttcctgactttttaatgattgccattctaactggtgtgagatggtatctcattgtggttttgatttgcatttctctgatggccagtcatgatgagcactgatccagattttttaaaaataaaagaactacaacaaaaagctcctaagagcaaatacttaaatctccctaaccagttccagcttctcttctcttaattcttacaaaatttcccctttgttctacggaaggaattgatactgtctacagtagatagaactggaaaaaatgatttctgtttcaccgtgtattgctttgagctagtcattcctttagtttgctacagtaaaagatttgtgtaggttaggtctaacttttgctgacttaattttttttcctctatacattttatctgatgggaaatacatgaaggctttggattctctttcaatgtgtacatgtaataggtttaagcagagtttgctagtggcaagctgctctcatctccaagtgtatttctggcatcaaattattgttttgaagtattttaaaattgtataaaatatataaaactttatttagtacttcataaagcttccaaaggaaagatgtgtgcaattttgtgacggttttctttttcttttatcttctcactaactacaattgtttttccgaatgttgcctatgcctctagtagaatttttatatgaaataaacatgaggttggctttcattgacttttagtcccaccagtaactcaacatttatttagcactgactatgtgccatgcactttattagaggctgcagaaacaagatgatgaaaagagtgtgtcccttacccagagtccagcagaggaggtaatttcagcaaacaactgtagagtgcactctcacagaaggaagcatgtgggctatgggacagtaaaagaggactatttaaatcagacagggacagaggtggagtgggaaaaggctgagtcctcaagaatgaaataaaagagagtgggaaggatttttaagagaaaagatgagcaagcacacagacctatgatgaacaagatgtctgtgtcggccaggcgtggtggctcacgcctgtaatcccagcactttgggaggccgaggtgggtggatcacctgaggtcgggagttcaagaccagcctgatccacatggagaaaccctgtctctactaaaaatacaaaattagtcgggcttggtggcacatgcctatattcccagctacttgggaggctgaggcaggagaatcgcttgaacctgggagatagaggttgcagtgagcagaggttgcgccattgcactccagcctgggcaacaagagcataaaaactctgtctcaaaaaaaaaaaaaaaaaaaaaaaagatgtgtgtgtcaaaaaagaaataaccatgagtagggccttgcttaggggaacagattctggagaaatctgagaaatcctcagccactggccatctcaaagactggccatgtcaggcatctgcaggtaggactatatcttcaagagtaggagtcacagagtgactcagagtactgtgtgacatgggatctgattttattttatatggaaaattctagtgctatgcaattaatggaatttaagaaagtaaagttgaagtcagtgcaaccattatctttgaccatattaagaataaaattaaataacttatagaccatttgcttctctgacgattattcttatctaagacaatctctgtattaaaatcctacgcagacatatgttcccacaatatgtcaggtatgaacagaaggactgcccaatgtgacttgaaagggagtggacttcttgctcttaaaaactacaaccttgtagtcactaacttattaatcatactgtaataagatggagaaaaaaacaatggaattcaccagaatttctttcacgagagtctgcctgcattaaaatgttcgataaagctatttatgacagaaggtgagactttgaagagctttggtttgggtggaactaatctgtgcctcatctacacaggaaaggggaggaatatgccagttgctagagagggaatatgtatgtgtgtgcatgtgtgtaagcgcatgagagagcgagagaatgtgtgtttgtgcacatgcatgtgtgtgtgtgtaagagaaaggagtcagcttggtctctgtgtgtgcatgtatgtaagggcatgaaagagtgagagagagagagagaatgtgtgtgtgtgtgtgtgtgtgtatgtgtgtgtaagagaaaggagtcagcttggtctaaagggtaactccaatttgtacatttttcctttctcccaatcatcaataaggttattgaagatgtgtgtgtgtgtgtgtgtgtgtgtgcatataagagaaaggagtcagcttggtctaaagggtaactccaacccgtgcattttccctttctcccaatcgtcaataaggttactgaaggtacaaaatcccgacttgttttgttttgttttattcattgaagggactgagcttgaaggccagattggcccaagcagaaatgtctctctgagctgacataagagaagagtcaaagaaagaggagaaagcttttataagaataaggaggccttttgtccaaaaaattggagtttgagctaagtttaattaggcatctaggttgggggcttcatgtgacatgtgtgcaactgtgagtgatattattctttgaaagaaactggaagagtggagaaagattccaatctctattccacttcatacaagcaattccaggcaattcagctactaatctttctagggccttatttcacctatagattggagataataacaagagccttgtaagttattttagttcaagtgagaggttgtgagttaaataatcttgcattgattgcctaatagattcttttcccttcctcctccattgtatcttcactttctcctggactcaagtctctaacttaaatgcaaacattctattaattttagtgagcctatcaactaatacctaggtataacctcggggtccagaaacttaatagttacctggaacagtttttagggtagttagaaagaaaaaagaatttcaaggaatgaacagggattcattctgaagaagttcacttagagaacacaggccattcaggaagctacaaacaggtagggatataaagtttagatcagacagtggacaaagataaagatggagaactagtcttggaggacttgtatactattctaagacaatattttcttctaaagaggccattaaaaatcttctaagtgaggaagtcacatggtcagatttgcttttcaaaaagattactctgggaatagtataaaggcagatcagaaaagtaaagaccagttaagaggttggtgaccagataaggagaaaatcctaagcagtccctgaaggggaaggagaagctgcagaaagttaggaggaaaaactctcaggagcaaagaaaaaggaaatgtcaaaggaaaatattgttatggactgaatgtttgtgtctctccaatattcatatgctgaaatctaatccccggtgtcacggtatttggagggaaagcccttcggaagtaattaggtcatgagaatggagccctcatgaattagattcgtgccattataagaagaggccagaggttgctctctttctaccatgtggatacatgctatgtgggcagtctgcaaccctgaagatgccctcaccagaacctgactatgctgacaccctgatctcagacttccagctcccagaactgtgagaaataaaagtttgttgtttaagccatcagtttatggtattttgttatagcagcttgagctaagacaaatatcaaggctttgccattgatattcagtacagaccgtatatacccacaggtttgcgctaagataattttcattccaaacacatatttcagcaacacaagactaaagagggtgttaaagaatgctactgaggaagcttttgtctgggaagttgtttgaacaaagttacaggacaatttttgcaaacaggtttaaaaaaagttacaattatgtatgctatttacgtattcttgttgtaattttaggaatcaattttatttccctggggggactgtaggagagcatctgtgtttccatcatatactatcaatcttaggatataacagtcttttgttcttcacctttgtcaattactgcatacagtattccttagagaaaacaaggagtttgaacagattatctttagcacctacccagctctaacattcatttattatctgatttctgaaattgtactatctgggttaggtgttggttttaaggttgttcattatagttagcctggatggggtcagctatgtttgtagagggaattcctaaactgaccagttacttgtcaaggatcccatccaataccatgatcctggaattctgtgagtttagctcaactgttcttcaggggtacatgttttctatttgaaattgaggtattctcagaaataaagctattaataaatagaaagttctggagtatatttacactcactctgcttatctccactcctacccctaccatattcccatccaatactttgccagttgacttaccaatttcttcttaatttctgtaactgtcaccttcagtcaaattctcatctgtgtatttctagattcatataatggtctactactggatctccttggattcactttttctcaacacagtcctatttataaagtcagaataatcttccttaaaccctggttttattgtttcattcttttaagaacctgctgcacaactctctcctacttattgtattaatgtcacacttctgttcacataggcctttttcggctgcttttcaatacctttcccttttatttacatctaagactatcccatccaagactgcccatcttagccaatctttccacctggaaataatttgctggcttctgcctgtatgacttttctaatgtcatttttatatttgtgtctaggcctttctataactgtctagaaaattcctgacatttacaggcactcagcaaatatttgtgagtgaataatcagtaagtatgcttgttttctatcagataagaatatttatttccaaacgagattcaaacagtaatactggcctgggtgtggcttcctacatgtaatcaccctcgtctatctcttgttctcagtcttttgctttcaaactctttctctttttttaaaagagtattaggaactaacattgccaaaatttggtaatggtcaagcagatcatggtgtcttactgaagtgaaatattaacattaaaataaaaatgacaagtattatggtatatcattcatatgtaatgatccttacaaaatagagtaaaattttaaaagaattcaccaatacaccagtatgatgtttgggagaaacagatgaatgcacaaaggtgcatctgatgcaaacacccccagaaaaatgagcataagttcatattatcaatatttttcactctaaaagtgttcactgacttccctgaagtcaccaaggactccaagttaagaatactttcctgagtgaagaaaagaaagcaattattttaatcaacactgccccagaatcttttattcggaatcgctatctctgctttcttcttcttcttttttttaactttctcataaatctctgtttagcatttatatctctctcactatgagatacctaagggttaagaagtaatgccaaagagacatttgtccagttgaagactgggattaagaaaaaacacacagccgggcatggtggctcatgtctgtaatcccagccttttgggaacccaaggcaggtggatcacctgaggtcaagagtttgagaccagcctggccaacatgatgaaccccatctctactaaagaaaatacaaaacattagccacgcatggtggcgggtgcctgtaatcccagctacttgggaggctgaggcaggagaatcacttgaacccgggaggcggaggttacagtgagccgagattgtgccactgcactccagcctgggcaataagagcgaaactctgtcccaaaaaaagagaaaaagaaaagaaaaaacacacaaaagatttcccgaaaagactaggcccttttaaacaggctatgaacagagtctcagaaaggtaatttcttatgtacaatttttaatctcattacttgcattacaagcaacacatatgagtgataaactattttggcctactggtaaacctacatttgttaactgtgtgtgcattatagagaacaaatttcagaactcaagagtatatcggttatatttggcttatccagttgtatatgaactggctccatacacgaataagataaattagttttataattttacaagaatatctatggagatttagatttggctaagaaagttattatacacacagaagaatccacaacctataagagctcttcatgggaaatagtgtgatagatcagaaagagcatggacttttgagtcactcagaacttgaattccagccttgccattgttctagttgtattatctgaaataagccatttaaaagacctgagcacattgtatacattgagaattacagggttattatgagaaatgcataagaaatgtaaagtaccaagggctgtatctgacatatagaaggtattcaatcaatagtaggtatactgaaccactttgcagagttgtttaaataagttaattttaaataaggtagttaatatttgagagtttccttccttttccacagattctcaatcctaaaacagttactatttttccatcatcaccatcaaccctcaaatattaaccagttctgagccaaatgtgagtgaacaacctatgatttagaatagcttttagaccaggcacagtggcttacgcctgtaatcccagcactctgggaggctgatgcgagcagatcacttgaggccaggagttcaagaccagcctagacaacatggcaaaaccgcatctctactaaaaatacaaaaagtagccaggtgtgtgtggcacatgtctgtagttccagcttcttgggaggctgaggcaggagaatcaattgaaccctggaggtggaggagatggtgccactgcactccagcctgggcaacagagtgagactctgtctcaaaaacaaacaaacaacaaaatagaatagcttttacaagaccacaccaaatcatgaaaagtcaactatgtaggaagaatatgtatttgtcattggttaatgacagagcatcacttacactgaggttactgggaagatcatttcaaacatttcccaaagaatgttccaatcaatattgtccttataagattctccttactaatgacgttttgtggtcaaacaagcttgggaaatattgtatatgtaggctttttacagtgatttctaatggacacgaacctaccaaaagctagaaggtccacagcaaaatgagatatttaattttattaacaagcattatctaaacctgtttgattttagaatgcatttttcacacaacaactatcacctcttgaagaatacctggaataggttttcctatacctatacctatatgtcaggtaactccaaaacattaacaaatacatgtgtttagtaggttcccatatggttgaaatctccactaacgacattttatttctcttcctcctgactttgtatgctatcgagaaatggtcagagagtaatcttcctccctccctttcttcttttctttctctctttttccccctgaaagagaatagtcaaaaaatccatacatatttattgagcctctctgatgtgatagttgctgtgaaatacaagaacatgaaagattcagcagcctgggcccaggaaggaaccataataacctgctgagaaaatcagacacatgatcggctgctgcctagagacagtgtaaggtagcatataaatcattcagcctgggagtgctactgtagttcgagcagggagagggaggtatggactatagctcagtgtgctgggtttcaggaagaaggtgaacttggatgtaggtcttcaaggaagactgtggttttaatggctgtgggaggagggagtccgctggcattgttttcaggtgtaggaaatgtctgcagcctgaataaaggttgtatgtgtggacagtaaatgggctgggtggagtagacacattccagggaggagaagggatatagagttgaacacttaaatgtgtggccttgagctagtggatattgtgggaattggataagtgcactggtagcctaagaggatagaatggagaagagagaaggatggagactaaggagctattgtggtagtccagatgcagtggaaagcaaagagttgtggaggtatccactttagtggtctacgatgacagttacaagcaatagaaagagtatgacttgggaacagtggttcaaatgctggctctgcaacttagcaaccatggggcaaatttgggcaaattaacttctctgtacctcagttttcttttttgtaaaatagggctaaaaatacattccctagaaggtggcctccaggccattttcccacactttatttgaatgttaaaactaactttaatctaaaaatcatatattcatatctctatcttttttggcggttcagttcaacttaaatgtgttatttgttaaaaacttgtaattatcatctattacatgtaaaatataagagctgcttttaatagtaattcatctcctccctatctttttttaaaacatggtcaaaattaacaaaacaatcttgtatttttgatactagtagtggtatcactactactagaggtacaaggactcttgtacctctctgaaaagtagcataattagcaacagtattgatggtatctgctattttagattatttaaactgtagtcactaaggtaagcaaggggaagaaggcatgtcatttatgtgtttttcatccttaagattagcgtttggaagcatatattattccacagcaatctggataggtcttgccatgccctgatcttgtaagcccaaattttattttgaatactccagctttgcacttaaatgacagctccttgataaaagaaaaacaattgcctaacaattttcttccaattgtctgaaaacataatgggtgtacatacacacacacacacacacacacacacacacacacacacacacacaatctctagggcatatttactagatagtattatgtaatgtgtagacatttttaattatgataattaagacaaaaatatgtgtagcaagtttttgatttgagacaaatttgagatttactaaaattattatatgtgtgtccttctgaagacttcatattttcattatatatcttcattcttgaagtataactcttaaattgttgaattaagttttatgaattaagttgttttgttttttgtttttttttgttgttgttttttttttttggccaggcacggtcgctcatgcctgtaatcccagcactttgggaagtcgaggtgggcagatgacttgaggccaggaatttgagaccagcctggccatcaaagcaaaaccccatctctactaaatctaatcttgtgcctcaagcgaggcacaagactcacttgaacctgggaggcagaggttgcagtgagctcagatcgtgccactgcactccagcctcagggacagagtgagattctgtctcaaaagaaaaaaatttttttccatttttaccaataccactattctcaattcatccactatttcactaggaattactaattcagtttacataatttattcaatgaataaattattcaatgaagaagcttctgggtatttaggtgctacatgctaatttcaattggcatattttgtttttcaaatttgttcttggtgacccaataattatacctgtccaccttgaaagtgtctttcttcatcaccttcaaggccaccgctaacaagacctttgaaaagaagtaaacagtagagaatttcaacttctgtgatgaccaccgtcttcttctgaatccccagactccactcatacaaggttttggggaagtttaaatgaaatgaagcagtggcttacaaagtttattgacagtaaactacagtaaaatttatattttatactataacctggtagatttgtttaaagtaagaggtgctcacttttgaaggcatgtggatgctggctttcagtaatataaaaaaaatgtacaaaaaggttttatacctatatttatttttaaaaggtagaggagagcagtggactcctatttaaagaaactcttgtgttttataaataatagtcatggcaaaatttgtttacagtctttaacaaaccatgcatttcagtataaattaaaccaataaaaagaattatatatataaaataaaaaggaaatgtatatataggaacagtatataccatacacataagagtaaatatatattcgagccaatacagagaattgaaacataatttaacatgaaataacatttatccttactatgtatgattcactctgatgttttctattttatttaattttaaagtattaattgtgaccccttaaattgattttgaaatctaccaattggtttgaaaacactgaggtaagaaattaccttgcttaataaatgttagttttgtttccctcttccctcttcctccctttttataattaaaaaactctccctctacttctctacttcacgtgagagtagaacacataaaaagatttcagttaactactgtgcatattttttgaagtaatttctccataatgtgtgagttttctcagggtactacaagtttaccaacagaacacataaagcagcggccactcactgaaatgcctataggagacagatagaccatatgaatgaatgaatgacatggttgctgggcatcctggttgcagtggctagaactgtggagggtaggagcagaccaccatatatcctaggcatttcattggcaaatgaacaggagaaggacacctttccgtttggccctcattttcctagatctttcctcccttcctctgtcaatccctcctacatagcctatgttcccaaagcaccccttgtattataataataattattatgatatctgtccttaatcaagaacttatactggatttttaatgcctttaggtcttccccaaacttcagttcatctattcgaagtccctataaaatctacctccttagacttgtctgcccccattattcccctgtggttgacctcacctccatctctatcttttgtcagcaagtttcctcagagttccctctctgcatacttgttcatgctgggttatttgtttttgccacttgatcatctagacctttttccctctttccctccttctattcaatttctgcctttcactgctgtacaaaggaggggcagggaggccctccagggtggagggaatcagtcttgagataactgagagattcagggtgatgagtcccaaagttgaagagaatccacatacttcttctgtttttgttttacctagcaaggagccttttctatagacaaagttgggaaaccagaggttatgacgtgattcatctttgcctacttaaactttagcttgattcatcacttctcaacaaatacttgttgaaccccaccagtaatacgagaagcttggtattctatgaggtgctcaacttccaaagcttagttcagaagaattctggcctcaaggcgtctaccatctagaagcaaacaactaacaaatgaacaaatgcagtgatttcaaaagaaattaaggtgtgctgtggtagaggcatgcacaggtcagaaaagttcagaggttccagacaggcttcctggggaggatatccatgccccgcctccacctggtagttcatgatcagagtttgcaagcttggctgggatagagggaatagcgtgtgaaccacagaaggagtggatctggtggctcagacacggcaagaaccagctcatggcactaggctgcaggcacaccatgcacaaaacagtcttttctttccccagttctccaaattctctaaagtggaagcctaggggtgagggtaagaaggaggtaggaagctacaaccactggagcaaaggacgaaagaaggggcttgagtgtctaaaagtgcagaaactcaaccgactggacgctgagacaatgtttaaaaaggagtttttttgtttgtttgttttcttgtgtttttttttactttaagttctgggatacatgtgcagaacgtgcaggtttattacataggtatacatgtgctatggtggtttactgcacccatcagcccaaactaggttttaagacccgcatgcattcggtatttgtactaatgttcttcctccccttgctcccccaacccccaccaggccccagtgtgtgatgttcccctccctgtgtccatgtgttctcattgttcaactcccacttatgagtgagaacatgcagtgtttcgttttctgttcctgtgttagtttgctgagaatgatggcttccagcttcattcacgtccctgcaaaggacataaactcattcttttttatggctgcatagtactccatggtgtatatgtgccacattaaaaatgactttttaaagtggcaactgtgggaggcaaaggagaaaaaacaggagctgccagataagggagtgaagagaacccagcactttgagaattccgttacattttgcagcttgaattcttcactttttgctcccattatgtgcctctttctcctctccatgaactgggccctgtggacccaggatcctgctgtctttgcagggcaaagaatggttagaaatgaattcattaaggtgagaaaccattgctggcataattctccttcacggaaacctggcacttaaatttaacctgtttggttagatccagctctgcctcccccatttttttctgcagaaacaaggctggcagatccctgttcctcttaatccttgaatggaccaaatgctgggttatgctggggcagtgagggaccttacaaacactgaaatttaagagaacagtttttggagtaaggcagtccttgtttccaaatctgagctttgccactgattgactagcttggcaccttataaaagtgaattaacctagcttgttttctaatttataaaatggagaaagcagtacctatatcacagtatgattctgaaaattatttaaataggactatgtatgtaaagcagtgcctgaaaaatagcaagtggtcctaaagtcactatgatgatgaattttatatgcaggcacctagagcatgttaggatttttgggatctttcccagctcacactgaagcttcactcttctccaacagtctgttatccaatgctggataactgagatagtcttcccagcatttatcaatgtggttaggaacagtaatcctggaaagcattctcaaattatttatctaattaaacaagcaaacctttttagcccagacatcctaaatctctgtagcttgtcttcgctgatttggtcagaatagctcagatggtaggaagggctttctgggtagaaaaaaataaattagcagtctggaaaacaaaagatctctgcttaaaagagtctctaaaacagcctgatcagcctgtgtattttgccatattatctagcattagtaggggactgggaaaaatccagggctccttgtagagatagagactggcaaatattatgtttgatgcatgagaaccaaatcagaagttaactctttaagttattaaatcactaaacagtctatcacaattatgtgtttattactagactgaatttctctggggctggaaccataatgaattcattttttgatctctggtgctaaacactggctgtcatatactaggtatccaataaatgtttgttgaatggaactgaaaaagcatgaaacacttcccctgttaaggcttcttttctataatatttccatagtttctaatgcatctgagaatcattaactggactgttagaggaatatgaatatggttgagggagctacaaacttcatgctctgagatgtcacatgattagtgtaacttttgttccaggggagagaaatccctaagagagtgactgttctccatgcccacccacccacagtgtcctatagagcctttcattctccagatgcctataatgactatcacattgatttgtttacatatctattgccttgtcttccttataggtacagagtccatacatcctaattggcctggaacttccaaggtctatgcctgttataccagtgtaattatgaatagcattgcctttcattctaaaaagtgttctggtttgaatgctaaatcatctagacaccctacttatgagagggttcactgtacatcgtttagtcccccaactcccctccccttggaaatctgggtactaccctctaccgggggctttccactatggaggcagctctctcaatcacagcattcaggaggtgtaagtccactcccaacagaacagacacctgtctacaaagagactcttggtggaagaaaaaaaaaaatcacttccgtaagtttaagtcttccttttaaacttgggtctcttttgcacatcagaaacaaagaatctctaataattacatccctaaatgtactgaagtctagaagacatgcccatttgaaaactctaatctagtaattaaagcttctcaggttaaactgcaccttaataatgtagcttattttgtcaagatcagttaaggccctgtaatgtgatttggaataaatggacagacagaaattaaaatgtgctggacaaggtaatcagaaatctcacttcatttagtcaataacaatggcaattcagcgggttccttttactactgggatgtaattgtgcttggctttaatttcttgtaatgatggaacaaattaaattacttcatacttttaggaacatttggctacatcatgttttggtgcttccataaaccccactggaaattaaatcagctctgtggttgctcattctccctctttagtgccatgtctgccttctgtcagcaaaatggtaatattgtctaccttaatccaccagatgcagttgagttaaaagaaattacctctcccacctctttcctttcaaatctccctatttgtagctatcaaattttggcatgcctgctggaacacagtcttgttagaacaagcacggtaattctctcgtgagactttaggactctctctacgacaaggtcagaatgtacctgtgattcaaatttagatgaggatatgagttggtaagaacatgaagagcatcagacagttttcaggacacccactacttttattttgtgctatcagtttttcctttcccaaattgcaggtggagatgcaatctttaacgctggaaatctcttgctatatgccattaaaattaattagtctagcacattttatctttaggcccttacctagggcaggtaaaatattctagcacaaaataacacaactttcctgaacaccatggctactaagttcatatggtaaagattatactatacattaccttgcaaatagagtgttgcagactgatattaaatatttaaaatgtatgcaggattattaataggcaacattgtggcagagactgctaaatgtcccctaatattgatgcttttcttcatcacttgttttcaaatacctgttttcatgtaagcatgtgactgcccaaaatagagaaaattcacagcctccttggttgccaggtgttgccatataactaagttttggtgaatgagttggtagtagaagcgttatgtagatattatatgatgtgctagaaacttcccttaagagaaatttgtcatctatctttttatctgcctgtatttattgttttctctttcctactggctagaatgtgaagttgatggctggagtcggagcagccatattggatggtgagttgaatttagcaacagaggctacacctcacagtgcaataagatggaaagagcacgtgtccttgaagactgtactggatagaggtgccatattaacctcggactgccaactttcagattttacatgaaggagaaatatctgtcttccttaagccacttctattttaaatctctctatttactgctgaataaaatctcaactaacgcaaacaccaataacaaaaaattcctattcactcatgatataggattataccttagtcttttttgtgtcatatatctgttcattcaccatttttgctttgatgttcaataaacatctcaaatttaacatatctataaaaattttttaaattttacgttcaggggtatatgtgcaggttagtcatataggtaaattgcatgtcatggggtgctggtgtacagattatttcacaccgaggtaataagcatagtacccctacagcttagtcttaagaagaagtatgttcacataggccaggctgagacttggatgttggatgactttcttccagcttactctgatttgaatatattgtgtggtagtagatggctaaactgcttgctccaaaactatctgacaatgctttttagaaagtctgccaaacaaaactacaagaatcaccctggagcttcccttaggcttcagatatttgtcttccctgccctacttggaaatcattccagcctggaagtcattgtgaggaaccaaaaaatggtctccctaccatgaagaataacactgcttccattgttgggaggctctccttcctacaggcactgtccctcactcattagacacttgaataataaggatgttcatatatttattggtgttggtatcagttagacagttgaatgatacaaatgttcatatatttcttcttattcaatagtctcacaagaacactattcttgtaaagtcattaaaaactggatggtcttttcataattatttccatgatttgtcatctaaagccagtgttctctcctcctgtcaatctgatagctttaaagctaagttctgggtgggtccaagtcatgcctgaaaggtttatcaaatgacatattgcagtcatatggtcggagcacaaacacctctgaatgtacaatattttaaagcaaaacagtttatgtgtaagctctatgaggttacggaccatgactatcttatttattaccaaatccccagctcctagaacagtgcccctcaatataaatctgtcaaatgaataaacgaagagtttgcctgcagtagtaaacttgttatttgcacacactcgaggcccacctctatgtgtacattgtcagtgagtcagcctcgtggatgactctgcaggactgtctgtataacatccactacagttaccaggggacccaattttcataaattgctccagcatcacaccctcctcttacagagactcttcctgtccattctaatccctgacacgttgtcatcctcactcagattccccaatagatagaaatgctgttaaatatacttgggtagagagggataggcatgctcaaactcgttttgggaaaaaaaattgcaactgtcagaaatgtgttagctatcttcacagattatgaaacataaatatcaattatctgttcacagcagtgaaagcctgcatatttttttaagatagcaagtataaaacggctataagtaccatgttgagtagagacctaccaccgaagtagagaccttcactgaaatagtgaagggatggttgtgttgcagggtcagaatgattacccactggttgacactccctccaggactaaaggcagcatcaccagcgtccactctgcttctccactgcttactgttaaggagcaaggcaatagcattatctaagtaggaactacttcattctttcaaaacctggaatcggctgatcagaagaagaaaaacagtataaaaatacagaaagacaagattctctggctgtcctaatgaatgctagctagctataatagcatggataagacatataaccaaacatataagatctattaattaaggggaatctctatttgtattaactcatctattttctctaaaaccagtatttagttatctcccatacattggcatattgtgtatatttgcagaattcaaaatgttactgatgtgacttttttccatcagacatctgagctatccctcaactaatagttgagctgttcctctatagctcagtatctgagttagaactcgaagtaaaaaggtataaataagtcatgctataaaattcaaaggcaatcagatgtttgagactatagttatacagaaaagtgtccttgttcttgggaggaatacatcgaggagtttagggatagagggctatgatgtgtgcagttttctctcaggtggttcagagaaaaaaagacaatgtgtgtgtatgtatatttgtgtgtatgtgcacatagagtgatactgcaaatgaggtggaatgtttacaatgagtgaatgcatgtggttttttttttttttttgcactacccatgaagctttccagtgtgtctgaaataacttccagataaaactttttttaaaggcaatcagaacagtggcaatgaataattcaattatttcatatttgagctgtctttcctgccacccccaccccctataacactacatacatacataggctcacataagtgacacttactatacttttttgcctatgtaatgagtgttggcgaagtacgtgagtgggaaattcagtcttttgcattcaagctctaagtaattctaagagaccttttagataatgatttgacttttaagacaacaattttgaggttataatatgatgtcatttcatataaacagaactgcccttttgtcctttcagatttgattgaaaatggcccatggagtacaaccacctgggaacatatcctcgagaaagacagttgaggcttattgcctaaaccacaggctactgaaaacttggccaaaggcgactactctagactggtgacttcaaaagtgctgatgaatacagtgaaccatgaaagatgcattatttgttttgaacattttactatgattgatgacccagatttggcaagttagttcactcccagtggagatgaaagtttcactgccttctttctttcaacattcttgttgagacagatttcacttttattggccaatgtactaacaaatcacttgcatttgcagcataatgaattcattagcaacactgtggatcaatgctatacataatattcctgagtcaacattaactcttaattaaacttccttattataatgcctctggaaattttccttcaggctactaaacttcaagccaacagtctaagtgttaatcagtaatcatgctagtaactttttgagatgggtcagggccagggccagggtcagtgatccatcatgaatggcaggtttaaaaatggatatacgtgatcaaaaatacccataagttgaccaaagcattctaacctttgggttattctaacactcagtgtatcagccttctgagcaagccaattttttattgccttaaaaagtctaaaagaaagataaaaacagagataatcagttttgtttggcaatggcaggggtgtgggaaatgaaaaagaagaaagttaaagatgagtgaaaataggatagtcttggcactttggtatgaaattgaagtacttatttaaactgatgaatattgtacagaaatatacagagagcagtgaggggctaagaacctaattccaaggtaactacaaggaaaaaattattgatctggattgtgaccagaattcaagagtttgactgttgtcattgttgctgttgttattaagttaaaaaaaatgagaaaaaaatatacttttttctagtatacttaccaggaaaggaaagagagaaggagggagggaaggagggagacatggagggggcagagggagagagagacaaagacactgacaaagtctggaaaaagacacaaattcagatttaagatcccaaaatatgctacatttctgcccccttcaaaatattaaactttgctaaaatacactggaaattttttttattgtttattttttaaatcaactagcagaccaattagccaagatgatattttcatccttggtactctttcaggtgagctctgtgggctaccaccagaaagtcctagccaaccaagctctcactgggtcactctgtgctagctagactacatagcctcctaaaaaagcacgcagccctgatgctggtcctgccaaagtgtggtttgctgtcatgtcctacaggctacccgtttcccagtgatttatcataataaaccaaatgggaatgaaatacccagaaatatgccataaatctactagtggtgaattttcaatattctgcacaccatggtgatttgttaattcagttggatctctattaaacctctctaaaatgtcattaaaccatctgttttgacttgttaatcaaacaacttttaaaaatgtatttagagtatcagtaacccttgaattaatgcatccatcagtaataatcccctctccaactttagatttatttttaagctctagcttttttccccaccattccaacaaatagcctgacttccaaaagtaagaatcaatcacttcagttgtagaaatgtccagagggtgccctactttcgaaacaggaagtaacttgatccagcagtcccacttcttggtatatatccaaaagaactgaaatctggatcttaaagagatattttcactgcagcatatttgtaatagctaagatacagaggcaacctaaatgtccatcaacagatgaatggacaaaggaaatgtgatatatatatacacacacacacacacacacacacacacacacacacacacacacacacacacacacatatacaatgaaatattattcagccctaaaaaaggaaggaaatcctgtcatttacaacaagttggatggaactggaggacatcatgctaagtggaataaaccagacacagaaggacaaatactgcatgatctcacttacatgtataatccaaaatagtcaaactgatggaagcagaaagtagaatggtagttgccagaggctgggggaagatgggaattggtagatgtggtcaagggttacaaagttttagtcttgcaaaataagttctggaaagctgctgtataacataagtatacaatcaacaatactatattgtatacttagaaatttggtaaaagggtagctgttatattaagtgtccttaccatgaaaggaaaacaaaacaaaaaaacccaaaaagatgggaggaaacttttggaggcaatgaataagtttatggcattgattgtaatggtggttttagggtgtatacctgtctccaaacatcttgcagaataaacatattaaatctaaagtttccttgggaaagaagatgagaaaataattgtcaagagactgtacaccaataaaatagtcaaggagtacaatgaaaacttaggaatcccatttcttcctttgactcacactgtttgatgatatcattcacatcggcatttggaagttattgagacatttcaacataagattgtccttatgatctatgatttgggactctcttataagaaagtccattctataccaatttgttttgttccttggtaactagaccttctttaattggatctaagaattaatattcctatctcataaagaagactaaaaggatccaagtagatggagtttcaaaggtggtccccataaaagcatttttaccttaagcaaagatgtcccaatttttcctgcttgcttttcggatgctgttctaaaaaaaatgtaccttattccttctactaaaagaaaacctatcaattcattgattcattgaacaaatatttattgaacatgtagtatgtactaaacactgggtaagattccagatatgcaaagaggaataagtccctgcccttaagaaaactcacagtgtggtcaagctaacaattctagagcaactgtgtgataagggctccaaaagcacatgcaggaacacagagagaggcactcttagtcttggaggggcttcctacagtgggcaatttttgatgtgtcacaaaaggaggagctattagggcacaagaagagcaagggtgaagtgcagaaaggagtgaatagatggggaggggacccaggcaaagagaataacatcagcaaaggtgcaacttcatgggaacacagtacatttggaagcctgcccaccatttgttacagcagaatgcatgtgtgggtggagatgaggctgcagagatgggctggagaggattatgagagatggatgactagcaaaggaagttggtcatgtccttatgtggtgggggaccatggaaagatttttatttataagacgtggtttattcttcattctgtggcaaaaagcagatactatagtctgaatgtttgtgtccctccccacattcatatgcgatgaaacctcatcaccaatgtgatggtattaggaggtggggcctttgggagataattaggtcatgagagcacagcccttataaggggattagtggcttataaaggaggcccaagagagctgccttgccccttccaccatgtgaggacaaagccagaggcactatctatgacccaggaaatgagccctcacaaaataccaagtctaccgtgccttgaccttggacattctagtctccagaactgtgagaaataaatttatgttgtttataagccacccagctcgtgatttatttatttatttatttatttatttatttatttatttatttagagagagagttttgctctgtcactcgggctggatttcagtgccatgatctcagatcactgcaccctctccttcccaggtgcaagtgattctagtgccttagcctcctgagttgctgggattacaggtgcttgtgaccacatttggctgatttttttgtatttttagtagagattaggtttcatcatgttgcccaggctggtctgaaactcctgacttcaagtgatctgcccacctcggcctcccaaagtgctgggattacaggcatgagccactgtgcctggctatgatattttgttacagcagcttgaatggactaagacagaaggaaaaataggcctttctgtagcgtgagctgaaagacagaaaatagccataggtttctaaagagagaaaaagatatatgtttgacaatatgtttcaattagtactttttttgaaatgcagtaagttacctataccttattccatttctaatctatatgatggcatttaaatattgactaggtttctgatacagtttttggagtctgaatgtcactgcatggatgaataaaccaaacagatcggattcatatgggtttgccaaatgacaaatttttttccatgtaagattagaggaaaaactgatttcacccaatttcctgccttatttatattagaactgaagtcaatgctgttatccctttgcatgttcttttgtatttaaaatctgatatagaattgtgctgttacagaagaaataatttaatgcattctgccctcttatttctcatgagttttcatttaaaagaaaacaaaaaagaaaaaggacatggacttttctttatttctagactttataaactttttagttatcaaataaacacatgtattaattaagtaggtaaaatattgcatatattaaaaggtacttggagactcatatgttgtcagtttttcatgactcaaaatttatgaaaaaccatctaagactatcgtaatgaagttcaattgtagatcttgaagtgacaaaacatgaaccacattgacttgaggtccagggcttaaaactgcctatttgagctctaggttaaaagcatgtgtgaaatgcaaagtctgacatctgcacagctgactattgtgaagtctcagtatcattgttcataagtaaagcttgtccctaagccataccacaagcattcccagaggatatagatttcatttgatttaacatgattgttgatattggtagtgtatttcacgtgaacttgtgaaatcattgtctatacagacaattgagacactaaaacttttttttaagtattttttgttaggggctagatctgaggttttttattcatttgttcttttgttcactcatttgttagttcagttatttactcaaaaatgtatattgagcaattcctatatggcagacactgacagatgctggattcagtgatgagcaaagcattcgtggtttctatgcccaaggatcctatcccgtggagtgtagagtcaagcaaagaatgtcaacaacaaatgaaaattttaatcttattaatgttatatgcaaaaatgtaacacctccaaaaaagacaatttatttcctattaaggaatgaaggcagtccactgaggaagatcaacatgtaagcacatgtaaagcaaaataatcaataggtaatgtagtttttgaaaaagaaggggctttaagcaggaagtcctgggtttggacttgggtttcaaatctagctatgtactcttgggccacatacccaagtcttgtaagtctcagtttcctcctttttaaagttagcctaaaactacctcgctcatctaatggtgtgagaattaggtaaacagccaggtagctcatcaaattgtaattattataattgttattttttgagtcatgaaagttttcacactgaagggaacatttcaacttgacctggaagagtaagtagtttatcaggcagaaagaatttgttagggtattccagagagaaggaacaaaatgtgcaaattcaagtagtcagaatcaaaatggtttcttaaaggaatgacaaacagatcagtgcagttggagcctaaagttatctaaataatccgttagaccttttctttaactgataaaataaagcaagcattccaaaaatcaatttaaatccatcttcctccttatacctctccattccccataccatggaaacacagttttacctcttttacaatgagttgtcagcatgaagagacttggttcattaagattagcaaacttcacagcattgaacaaaagataaagaaaagtttatagcaaatacgttccatgtgaaagcatctccagcaggttcagaagatgcaatgaaaagactaaaacttgatatagggatatttcagtggtgctcgtaccagcgtcctaacattttgttctaccttagtaaaatctatcccttattactcatcctatctgtagactctcttatggaacaagaagcttttttttttttttccctaatcccgtggggaagccctctccttccctgggtgattcctgagcaaccaggaaaacagcagtcacagtcaacacagctagtacttgcagaaaatctctcttctgtgatgctctgaatgactcacagttccagatggccttgtcagcctttatccgcattccactcttggcaccattaacctggtctactgtggttgcaacaaataacttttcttgttatgaggaccagtgttttgaaaaatttaaaatgttataaaattaaaatgtttatatttggaaattatttccaaatataaaaggagcctgtcttcattatagattatttggaaaaaatgcagaggggtgcaaaagaaaaatggaaacaagccatcttttttttacccataattctaccactcagagacaactactgtgaacattttgatgtatttatctccagtctttctagaaggtagatcactgtaagagatttctgaagcagaagtactaagtcagaaggaataaacatttttatacctcttaatgtgtattgccagatagtttttgagaaatattacagcaatttctacttttagaagtactgcttgagagtgatgttacatggtattctcactaacacatatacaatgttataaatatgtccaaaaataaaacttagcaactatgttatctccttgtttcaatttgaacttattacaagagtgatcaatttttaaatttaaatgttatttttagcaaagttatagatgcaaatagtttagagaactaagtagtaccacaaggattaaaaaaagagatctcctgcagtgcatcccccacccacaatacatacatgtatcttccactccccagagggtacccattttcaaatattttagctgattcatttgctatactccactctatctctaaatgatataactttacagttacttcttaatagttcatttttttgggcattgcttattgatacttcatagcggaagataaggatttacctttgcaacacttcacacttctcatcacccatccttctaatatattatagtcttacttagattgatagtcattgtgtttccatgagcagaaccaaagaaaaactataagcagctaaactatgtaacataccctgattacctttttttctttgttttccttcttgaaaattcttgtcttttgttagtttctttgttcccttagatgtccatatatacttatcactaattcaatcccaaacttttcccatattacaaaaatctaagtatggctcaaacacatcaagaattttattaaattcatcttcttgaagaaatctcatccagaggcctctttgacctggattggttattctccatgtctcttgctcagctgtcactttgggatgttctttccttattatcccaagggtaatgtttttagagtttattcccttgttttggtgagcacgttttccagtagcttcctgagtcagtatgcatcagagatacattttttaaaggctcgcacctcagaaataatctttattccatgctcactcttgatcaatagtttggttgagtatagaattcttggttgagaatcactttccttcggaatttaaaaggcatcacttcattcttttctaggtttcaaaacgaatcttcagaagtctgatgcccttttgatttttgatccttctatacgatacgataatgatccttagaacaagtcacaagtctcttttttaatactttatattgtgctaaatgctccaattaatgagttctggaaatttttcttcaattttgtcctcctgcagttttctcttttttctagaatttctgattttagatgttagatttcctgaactggtcctctgatttcccactttttcttctgtattttctacctttttgtatttttgctccatttccatagagatgtcctcaatttacctttcaacccttctattgagtttttaacttattctatcatgtttttactttccaagagctcttttcctattctctgagttgttttttttttttccatagcatctgcttttgtttcgtggaagcaatgttaatatttatgaatacaatatcaagtgtatttcttctcctctctctgatgataccttcttcctgcaacatctgtacttttttatttctcttctttttttttttttttttttttgagatggagtctcactctgtcacccaggctggagtgcagtgggaccatgttggctcactgcaacctccatctcctgggttcaagcaattctcctgcctcagcctcctgagtagctgggattacagttgcctactaccacgcccagctaatttttttatatttttagtagagacggggtttcaccatattggccaggctggtctcgaactcctgacctaaggtaatccccccgccttggcctcccgaagtgttgggattacaggcgtgagccaccgcgcccggccaacatctgtactttgaagttggtctttttccatttgttttggtttctttcacttactttttctaagtatttgataaatcttatctgtctactcatatttaaggctagagtactaaaaatcagattggaagctctgtttgcataggtaagatttgtcaactacatccactttttgatgatccaactgaacagtttcattcagaaataccttgcaccattatctttgggttttttctcttgggttggtgaattctccaaaggttatatcaatctcctgtccagaaggcttaagcatagttggaagctgactaggggaagaaggttgggactttcaaccttcggaattcattcaacaaatatttgagcatctatatttggcagcctctattctagccaccggagacacagtggtaaacagaatttaaaaagccttgtgttatcatgaacacaaatatataagtgtttatttaatccctctgttttcagaatggcactcagtcttcaacctgcctaggccccccttgtctagggacggttttacattcatcaggaagtataccccttgtatacttgtttttcagcttccaaaattttgttgctgttatctcccttcccactttctttgtccttgtcatttatgcctataaacatccattgatggttttctgaaggcagaggagttaaatggatatgttaattactatagatgtaatcagaggtcttcatgttgtttttttgttttctgttttactattctaacttggcatttatagatcttctttgtgagtagtctgaatttgtctttaatgatttaacattgaaacagtattttccttacttatttgcataagctctttctttgttagtgtattagccattgacctgcaatatcttttaggatgaccgattctgaagcctgctgactgagttgcttgtggttcctgtcatttagaatgtatgcaggtcatgaatcgcttagatggaacagatggaatgaaacttgctctaaatattttaccaaaataaatacatttaaataatgtaaagaaaaatcttcaatcactaggctttgaacttataacagaaaggtatctgcttttaactatattaattcaacaaactttattgaacagttggtaagtatgaagcatcatctctctgagaacaaaataccaaggaactgagtcccatccttacaggattctcaggagtaaatgggtcaatacatagttataaaatgatgagggctgatctatagcagaagtacaaagctgagaacaactcacttgacctgctaagctggggaattcaggaagggttcagatctaaagagcagacatttgaggtggttcttgaaatatgagcacaatgatggttttaccaggctgcaaaggtgacaaagtgcattccaggctgataaaagagggcatgcaaaatatggcaggtacaaaaatgtgtatttaaggaagaatgagaagtttctggaagttgctgaagatacagaaaataaagtggggggcggggggggcgggtggttggagatgaggaggagatggtaggcttgattcaaattatggaaatgtatttataatgcaccaacttgtaaagacactgttgttccctacccagcagccactagaatttgttcaggtgtcaggcggttggtgcttcaagggagatcaggcccctcccaggaccaggatgaaccatgattacttcccagccaatttcatagcatttctcttgccaatgaatggcttagatataagcatatgatgaatttgtttctaatacagatctgagaaagaaatctgttaaggaacttctggtaaagtttttatctttcttaaaaagtgacagaagaaaaggaagttgtataaatatacttagagctgctgtagtcatcttgagaccataagaggataaaactgagatcaaaaactactgtgctgaggatgggtgactagaaagaaggaaagaatctggattcttgatgcatgtttgtactactagaatcattctatcactaccttcttattatataattcaataaatctcttattatttaagctattttaaatgaagccttctgttatatgcagcctaaacaaatatactgattcaagctcccagcaaattctgtcacacataattcaaggaacgtttgttaataacttcatactattatatggggaataaatgattagtcaagaaagactttctgttttgaaaaattctggaaagatgataatacagtatgtagatttattgtcatggctaatatacatctacatataacatgaattaccttggagtagtaataaaagggcagagtaataacttgtgcagagccctagactagaaaagttgaaaatataaaatggaggaaaaagtgagttatgagattcagtaatatgaaagtataagaaataaaagaatccaaaagccatagaaggttgaaactgaaaagaattttagaaagcgtctaggccaggtgtggtggctcacacctgtaatcctagcactttgggaggccgaggcaggcagattgcttgaggccaggagttccagaccagcctggccaacatggtgaaacctcatctctactaaaatacgaaaacataactaggcgtggtggtgcatgcctgtaatcccagctacttaggtggctgaggtggaaggattgcttcaacctagggaggcagaggttgtagtgagccaagatcgtaccacttcattccagcctgggtgacagagtgagacactgtttcaaaaaataaaaagagagtctagcctaaaccccttaattatacagattgaaaaccagtcctggagaaattggaagtcctcaaagagtttaccattaatggtggaaccaggacttccacacaatgttctgacttcctttagagcactttttattatatcatatagttccttacttctcactattaatagagattattttactaagagtaagtataataagagctgatcagaagacctgagagacataatggagtttcaattctaatttgctgttggctccttgaaatgctttgttgagaaggagtaaaaagcttacaaaacacacacacacacacacacacacacacacacacacacacacacacacaatttcttaattatgtctaccatgggcatgggatggtaggaatgccatgtaactagtttccatggatggaaaccacctaatgggaaatagagaaaaagaaaaagaaaagaaattgtgtgtaaattttcagctcattttggcttagattacatgatgaaacttatttctttgaaaaactcatttgattttgaattagattatatggaacttctcctttgtcaattttaatttcttgtcttgttttagtttgcttttctgagcagtagatatcctcccaattggagattccgcaaaattagtacttagtcatcttggttcctttcaagtagaaaagtttcttttaaatacttcaaatcattggtatgcacatttgttgcaaaaaaaaacctcattctggaaaatgttgcttattttattatccaaaaaataggtatttattaatatactgcatttcttttaaataaaataaattacagattttcttccagcatccacttatttggaattgggtacatatgaagaaaagacttcttataatatggaattatttcaaaagctattattacttcttataaatataaagcatacaagaaattctcaccattttctaagatttacattagaaagatataagtattgtcttttagaatactgtttttatttttctaaatattccttataacttacttattaattttatcctttctttgttataaatatccattttttttaaagacccatactatcttttcctatgcaatttaacctaacatattttctgtaaatgaggttatttagttatccatttttctacctcctgttgcttggcagtcctcaaaaccattgcagatctttctagagagcagtttttaagaacagtgctttacttttcaactcttgatcaacctgatgagaattctttgaataaaccagaaggaaggctaaagagacaaaagaatactatagtttccttaaagttaatgagccagaatcctttggcccactttggcattgaacaatgtgaataaaatggccactctcacatcagtaatttacattttatacagtgtgtactttacactgatatttacaaagaggaaaaacaacagttttttacatgtaagaggagctccttggcagataaaagaaaaacttactcccattagtacaacactggagtttaaatctagagaacaagtacttcagaacctagtagaaaaagtccctgatttgtactttgtatgaacaattaggtttgagaatattgctatataatcacagaaaatactggctattatactacgtgaagtcttcagtgacaaagagagaaacagaaaaaatagttaatgccataacaatgaaaatgtggaatgtgaggaacgcccagtgaccgtaaatatctaccttaataagcctgacaatttgtatacagttcatgcaattaacaagtgtgataaatatgattattactctcaagttgaaatcaattttcttggctaaaagcaaagaattgttattgagcagatgggattacttttctttgccaatttatcttcataaaactcaatcaatgccttgccttaaaaatgtcaaataactcagatttcaggataacacatacaaactaatctcttctgcctgtctctacctgatcactccctacttcaaaagctccaacaacatagtataactgacacaaatcaaagcaaaaactatttttctcactgctacatggtcttatcaataatccagtatttcaatatctaataaaagataccacaattcaaagcagtaatgtgccccaagctaccgatccacaacatatatattgatatctaaaaatatatggatataacttgttatctactaaataagtttctttgcagtgtggtgttaatagccagaattttaaatacataaaaacttgggttcaaatcctaactctgccacttaaatgctatatgacaattggtcaagttacttaacctctctctggtctcaagtttcttgtctgtaaagctgtaatagcttttagagtgctcttctgaatattaaaaaggcattatactcttagcataatgtctacatagagtaaatatttaacaacaaaataacaaatattaggtgtgttattggagaattggagttttaaataaaggagttgtccctaaggtacattcaatttaactatgatatttaaaacttcaatttttcacattatttttccaggaaaatatttcactcttatttctccataatttgttttgaattgtaaaagagatttgcaagcggctgaagcagttacactatactgtatatctgcaggatgggcaactgattttttttttcttcttttttttttttttttgagacagagtctcactctgttgcccagactggagtgcagtggtgcgatctcgctgcaacctctgcctctcaggttctagggattctctgcatcagccccctgagtagctgggactgcaggcacacgccaccacgcctggctaatttttgtattgattttcaagatttgtcaagagctcctaatattttcttttctcaaacacatcttaggactaccatgcatatcagtcagtcagctactctggaggtctgctgcaaggatacacaccttccattcccacccatcagatacttgtctcctttctcccccactccaagacagcaaccttccagctctagataaaaagagctagtctttcttgcataagaacaacaaagacaaaaaccattttggtagtgtatactgcagattttaaccaaaacttctctgaagacctctgatttcctaaaaaacctcttcatcccagtgcagttgctctttcctaaatgagcaaccgcgcatctggtcaaatttggtgaatattctgtgctccagaaacaactgattccatcccctttaatctcttcttctcttatatccatctccctccttgttgtttctctccatgtttacaactagttcattgatttaaaaaccaatgtaatacacaaggaagtatgcacgacaatgtttagtgtagtatggtttgcaatattaaaaaaggccatcagtaagaaaatagttaaaggataaacttgatatacatactatgctgcaatttaagaaaactggtatagatttatacgtactaaaataaaataatctccaaaacatagtaagtgcaaagatcaatcacagaataacatctgtagtatatcacttttgatttttaaaaattacccctaattctaaatgttcatatatataaatattcagttaaaaattctgaaaagatactgctatggtttgaatgtttgttccatccaaaactcaggctgaagtttaattgccattgtaacagtattaagaggtaggactcttttttttttttttttggtgacagggtctcacttcaacacccaggttagagtgcagtggcatgatcatagctcactgtggcctcagcttcccaagctcaggtgattctcccacctcagcttccagagtagctggaactacaggcacatgccaccatgcccagctattttgttgtatttttttgtattgatagggtttcttcatgttgctcaggcaggttggtctcgaactccttacctcaagtgatccacccacctcagcctcccaaagtgctgagattacaggtgtgagccaccacatccagcaagagttgggacttctaagaggtgttaggtcatgtgagctttgccctgatgtaagggttaatcctgttatcactggagcaggtttgttataaaagagtgagacgtttggtcccctttcctctctctctcccaatctgtctatctctctcccttttgctttctgccatgtggtgatgcaacaaaaggacccttaacagatgccagcaccttgattttagatttcccagcctccagaactgtgagccaataaatttcagctcatgataaattacctagtctcaagtattctgttagagcagcacaaaatggattaaggcagatatacaccatattgtatccatcactaagtggatactttcaagaaagacagcaagactaaggagcatgaaaaaggactttctcatattctgaattttaaaaatattttatgacatgaatatatttatctattacctatgtaataaaactagacattaagagaaaaatctcatggtagaaatcttaggaaatagagaaaaattagagaaaattaagaaaaagcatgcataatttcacaaaccaatggtagccactgtaaaaaaatgttatttcattctaatacatttctacacacatatgcacacagtgcatttttgaaaacataactgagtcttttctaattgacctcttactctacaaaatttgaaatagccaaaacaaatttttgattcctataaagagatagcactagagctggaagagatggctcatgcctgtaatccctacactttgcatgactgaggccagagaattgcttgaggccaggagtttgagaccagcctgggcaacatagcaggacccatctctacaaaattaataataataataataataataataagctgggcataatggtgtgtgcctattgtccttgctacccagaggctgaggcaggaggactggttgagccctggaagttcaaggctgcagtaagctatgattgcattacactctacccagtgtcaaggaaaggaaaggaaaggaggggagaggaggggagaggagaggagaggagaggagaggagaggagaaggggaatgggcaggggcaggggcaaggcaaggaaaggggcaggggcagaggcaagggaaggggaaagggcactaggacctatgagccaacataggctatggcttccactagtacaacttaaaactcagctgaagacatgacacatagaaaagggttgctgtgtctgtacacacacacgtttcccatgttcccaatcccagtctgtggtcagtgaaagtgaagattgcctcagagcctgcattatctcaagctactgacctaattgctaatgctttactctggtctatttcctgcatgacctcagaatgtgtcagtgtaaattccatagtaagacagtagttgcacattttggagtgtggattctgctttgaaacacaaataagtgtgatgaacgtgaccctggcactctgtagccctcagtttcctcaacgctaaattgatcactacagttccttctagtgtaaacagtcccacgaagaatcgtgctgaatggatgactacataatggcctgctcctagagttcttaaatcaatccttaaaactggctgcaaaatgacttcactcctttaacagtgtgggacttgtctctgttctccagaatgctcaccagatggtgaagaagtatctctctacctaccaacatcgtcatattgcttcttgccactcgctactcaaaaactgtgaaaaacctgtgggagcaagtatcagctgaaaagggtggctttctccttaggcaaaagctacagggcaaaacgggggccccaaacttctatcacgtcaaagacatgaaacagatgatccctagttttgatcttctttgaagtttattaaaaacaagcttgaatctgtaccaatcctgacaggtgtgaatgtaagactcacaaatgagaaatgctaagctttcctaatgttcaatttaatcttatagaccatgaaacatgttataattaaagatctgaactattaatatgaaggagatagcatatattcttaccccaaatatgactaactaggtaaaatcttcaaaatataatcatggcctgattatcagccattgtggaggagaattttaaaaagttcttcattgacatcccaagtttatgttttagacacttctaatcaaacatgaatagattaacttcaagtaaaaattaatagtcacattattgattatcatgattggaaatgtatttgaccagaacaatgaggaaagagcatagagtcctgctatcttcaagtatgaatttacacttttaactgatgtcaagtcatccatagtatgaaaactcatttatttttatttgaaaaatttaaaaccatcaaaatggatagtgtgggagccaaataatatataagcaatattttatgagaactacaaaactattaagagcagtaactagaattcggttactgccgttccttatttcagaagagaaagtcaaatgttttctgatatttaagaagtaataacttcctgttgttcagttatgctttctataattatatatgataagcaacagaaaaataggtctggttttggctgtaatgtgtatattcaattcaatattaatttggactttaaatcattttgctatcaaatattttgaacctcatgaccaggaagtaatcaggtaaaaaaaaaaaagaaaaaaagtgggtttgttacctgacctatctcttaagttcaaactttctataggtatttttctctacctttgtccatatggttatacaattatcactagatgcttgaattactaaatggttttgtatatcttttcctcaaatttatatttgtcctattattggcttagtctctcaaagtattacttttatgatattgctataatggtcctctatagtataaagttgagcccacaccatttatcctgccacttaacaatgtccttaatgtagattatatggtttggccatgccctaaccaaaatctcatcttgaattgtaatccccataatccccatgtgttgcgggagggactgggtgaagataattgaatcatagggcagtttcccccatgctgttctcatgataatgaatgagtttcacaagatctgatggttatataagcttctggaattttccctgctggtgcttactctctcctgctgccctgtaaagaggtgcattctgccatgattataagtttcctgaggtctccccagccatgcagaactgtgagtcaattaaacctcttttctttataaattacccagtctagggtatttcttcacagcagcatgagaatggcctaatacagtagtatatcacacttattaaagagttgatagtaaaatagcactctcagtacaataagaatagaatagttccttttcatggtaatgaatagcttttcttcgacatctataattaacaatgaaatcagaaacaaaaagaagctgtctccactattactgaatgttgctcagaaaattctaacgtaagcaaccaaacaagaaaaccaaatatgctgtacaaatatttttaagagagaaggaaatcattctattttaagataaaaattctgtaactcaaaattcaggagaatcaactgaaaggtataaaaaaggtagaccattatgatttataagaaaggtcaaacattataaagcatgtatccacaacaggtttttttctatataccagttagaaaatagataaatgatcctattcataatagtaataaaacatatcaaatatgtataaataaacaacgaaaaatgtaaaactcttgtataaatattattgcaaaacatcactgaaggacatttttaaaaacttgaagaatatatctagtttcctacatgggaagagtcaatattataaagatatcaagtcttagattaatctatgagttaaatgcagttacttttgccctaaaatgttaaaaggctcttaattatgcaattcgaaatgtgatgtctactttcttcttgaaagcatttttcctggaaccttctgatgactctaacttaggctgcctgctttctaggcctactactacacagttgtcatactgggatttattttcataaacatctgggttggttccaatgctctttgtatcctaggttttctgtataggattcccgttgctttgttttgcttgaatatatcttcgagtaatacttccttttaattaggaagaatctgtaggaggtaaagttgtaaacttgagtccttccatgtttaaatacatctttagtttgtcttaacacttgatagtttgactatcaattttgggttctagttcttcttcctgagaactttgaaaccttgcctagtctgcattcacttctaatcttgctgatgagaagtttgatacctttgaaagatcctttttttttgttctctggaaggattaatttcttatacttagaattccaaaattttcatcagcatgtgtatacacatctagatatgtatccttttttccttgttcggtgttggatgaaacttttcaatctgaggacttgaattactcttcaggtcaaggattttttttctgttattttcccacatcctttcccattcctccacttctaccacattcttcatatcttttttacttttccatcatattttatatccttggctttttgctctatattctaagatatttgcttaattcaatattcaagaatgaatattacttgaattgcattttatccaatctttatatatacatatatattcagtattctgctatttatggaaatcagatcatacttaatggttatattctccccctgaatatctctgaaaatttaatattgacaaatttttcccacacttttcattgtctctgtttcttctggaaagcagaagataaattgtctcaggaaaataaatttgtcctgtttatttattagttcctttttgtttaggctactggtttttttgtttggtttggttttttgtcttttttcaaatgtctggtgatcctttcttgactgggaatatttgtaatttaagaactaggagtttcttaagtagttggcagggatatcataaggagctctgtagtacttataaactgcttataagcaacttaatgcaatttcaatcaaaatcttaatgggtttttttgggggggacttgacaagtagattgtttgtataatttagcacaacgatgtgagaataacccaggaaattctaaaaaataagattaagagggaatatgttctcccagatattaaaatgtatttcttaaaatccataataattataacatggggctttttgtctagaaataggatgtaaagattaaaaaaggaactaaccataaacagtagaagtggcatttcaagccaataaggaaataatagattatgtaatacctaggattctgacaatttagaaaatctaggaaaagaacatcagagccctgaaataaagtaaaataaattccataattattagagatataaatatatgatgtaaaatgattaaatactagaagaaaatattggtgttggaaaagaattgctaaggatttataaaatatatttatatagagactatataaacaatataaacatacaggctacatagggactatttaaacttctatttattaaaatagagtatctgtaaaagtaaaaatagaaatgaataaatggcaaaaaagtgtaaaaaacaaacataaatgaaaagttaatattcttaatctctaaagaacactctaaaatcaataagaggccaggggtggtggctcacacctgtaatcccagcacttcgagaggcagaggcagtcagatcacttgagtccaggagtttgagaccagcctgggcaacaaagtgagacacctgtctcctaaaaaataaataaaaataaaatcaacaagaaaaaacaaatcagcccacgaataaataataaaataataaaaagcaaatatgtataattgccattagacacacaaaacagattttaatattcttgaagctaaattaattcttattaaaacaaaatactatgtgattcatcaaataaagagaacaattaaaatgataaaatatagcaacggaaataatgtagaaatagagactgctgatgaagtatatataaactttctgcagggcaatatgacaataatagcaaaaataaatctttaaaatattgggcaattctttagtttgacaattctaattctagaaatatatagtaagaaaacaacccagccttgctataaagactctacacaaagatattcatcacaatagtgcttataatgtgaaatctggggagagcttcaaatatttaataatagaaaattgcttaagtgtagtatattcatgtaaggaaatgccattaaaatgttatatagagaattgtatttaatggtaagaaaagtgttcatgatgcaatatactgtgaaattttaaaagcagattataaaatattaccttcagtataatctcattgttgttagtaaaactccttctctctctacatacacactctcacacacagagacagaaaaattatctctcaatggcataattattgacagttcgttttctcccccttgcttattattattttgtaatagatatgctatagccactcaataaatatttgttactaatttcaaaaagtatgtattattatatccaggttgttcatggaatttatcatgcaaacaactaccctcttgagagagtcaaaagtggacactataaattatgaattcatataaactatatcaggacaatgggcataaactgagtgtcccaggcacggcaaaatgtgcggataccctggagatgtatcttgactttaagaagtttacaatctttcttggggatagaagattaaaaaacatgaaaccattagaaataatctcccacaattagttttgtaaaagcaagtgcttaattgtacttgacaaacattagatgttactggaggtctaagaagtaagagctgaatactcgtcagaaaagctccctggaggaagtggggactgagtgatacttttagaataggtaagaaaaagaataatgagaacttttcaaatggaggttggggttgtagaaggaaaagaatcaagtattcagaggtagctgataacgatgttgtatatataaaatcaccctgacttttgcaaggggtccgtctatacagaagagtaaaaagtaaacaatctattaacaatgtactatcactgcctccactttacacaggagaaaatcgaggctttagaaggttacataacctgccaagggtcacatagctaaaagtggagagctgagatttgaacctaaggagttggtttcagagtctatgctttccaccctatgctgtactgcccactacagtcaagctctggcttcttgtataaatctgatgtcactctttgtgggactgcttataacatttcctcacccagaatccatacctcctcctttctgctctgtcagagctctttgtctattcacacacagttcaaagaataccttctccatcaaatttttctaacaattccaatcttggaattctctcctaccttggagttgagaacaccactctcctaaatttctgcctacttctcagccactacttctcaatctctttgttggattcttctttctctatatttttgtttttttagtctactcattgcctgtgtgagtaccttcacccccaaaactacaatacctacctaccattgtgctgaaaaccccagcttacattgctcttccacattccataaatttctatctggatgtgcacagacacctcaaacttcatatttccaatactggcatttaccctatctgcagtttttactatcttatggacagcagatgccagaaatctaatcactgaaaccagaaacccatgtacaattcttgagtcctccctctctcaagcctaaaatcctggaagtcaccaagttctgtctattttactctataaataactattagattcttctttcatctgaactcccttagttcaagccctctttgtttctcatatgattattgtagtaggctctgaactggttttcctggtacctgtctttcccctgcctactccaattctacctccacatcaacatttctcaaatttgaggggtcatagacttccaaggacatttccacaatccctgagaagtatacagtttccatatgagaaatcactgtagctaaaagttaaatacttttcttcagttgattatgtatagctaaggcaataattcaagcattagtaaatacaaagccaaaatgcaggcacattacgcagaaaatgcctgttcttgggtttttaaaaaatacgttaaaaaaataaggccagatgtggtgactcccacctgtcatcccagcactttgggaggctgaggtgggatgattgcttgagaccaggagttcgagaccagccaagaaaacatagggagaccttgtctctacaaaaatttttaaaaattagccaggcacagtggtgcgtgcttatagtcccagctacttgggaggctgaggcaggaggatcgtttgagcctgggaggtcaaggctgcaatgagccatgattgccactgctctccagcctgggtgacagagcaagaccctatctcaataaataaataagaccacaaaggaaaaaaattcttacagagaattattgaagtataaattgtgtcaaaattgaagaatataataaaccctaagattaatagtcctgtccttgagaaagatcatcaagtgatgcccccatgctttaaaaaatattccaagctttttagcataatatctaacatttcttagcagttcctaataggttacttctctgtagttacctctctcactccttccccatcacctatagtgccacaatctgtaacctgtttgaggctctctcacacctttcatactgcaatatttgctcgaactattgacccccaaccttactcatctttcctttctaactaactaacttctcctcatcctcaaagccccagctcaagaattttcatttctggaagaatctctgattttcttctcttctctagtcttgaaatggtatgtgtgaacccacagcttgttgtaatgtcattgtcctttctgtttaacaccctcagttgctggtccttgaagtctgggactgtcttaatctactttaaagtcttcaagccaagtacaattcctaggcatgcaatacatgtttgttaaatagatggatgacctttatttatatttatctttcccttttctgctacaattagttaactcattcatttcttcattcactaataaccacttatctgttattttctgggaatacaaaaattcataaaacatcatccttgcctccaaaaaacactttattattgtgccatccttctctctctttctctttctctccttctctaattatctagttgtgtaggtattttcttcaaaggaataacaggtactcagaggaacacttatacactgttgatgggagtgtaaattagttcaaccattgtggaagacagtgtggcaattcctcaaagacctaaaaacagaactagcattcaacccagcaatctcatttctgggtatatgcccaaaggaatataaatcattctattataaagacacatgcatgtgtatgttcattacagcagcattaacaatagcaaagacatagaatcaacctaaatgcccaacagtagtagacaggataaagcaaatgtggtacataaacaccatggaatactatgaagccataaaaaagaatgagatagtgtcctttccaggaacactgatggagctggaggccaatatccttagcaaactaacacaggaactgcatgttctcacttgtaagtgggagctaaatgatgacaactcatggacacatagagggaaacaacagacactgtgacctatcagagggtggagggtgggaggagtgagaggatcaggaaaatcaactaatgggtattaggtgtaatatgtgggtgatgaaataatctgtactacaaaccccatgacacaagtttacctatgtaacaaatctgtacatgtacccctgaacttaaaagttaaaaagaaataaaaaataaacagaatagtagggattcattacaatatcttctctcctcctcataattcttaaacctgtgtagaagttcaatacatatttgtggaatagccttattacgcctttagggaatggagcaatgccttgcctattaatctatacttctatcagagtttcctgctgtatggaaaacctgagtgttacacttcaaacaaatgaggcaatttatacatttttgttgttgttgttgttgttgtttttggcataaatgtgctaagtgagctggagtttcagaagagaaactgaatgttatatgtgaatccaggtcagtagcttggctctgactacaatactgatttcattcaagataaggaaactaattggtatcaattttagttgacattatatgttagttttataatattcaggaatttttgaaggattatttgatttttatttttatagatgttcttgctctttaacactaaataatgaggaaagataatagggctaacatttattaagcatttatgttggacaggcactgctttaagtatttttatatgtatcaactcattgaattttcacaactcttagatctatttgatagctggggaaactgaggcacagagaacctcaagtaacttgcccaaggtaagccagctagttagcatggaccagtgattcaaaaacaggcagtctgtactccttacaactgtattatgctgcctataaaaggaccactagactaataattatgaaaccagatttttaatcttaaattagccatataatagtagagtgcatttaaggatgtcatctgagtttcattgtccttgtaccccttacagcctgtgagaaggaacctttatatagtctttcataaactgtaaagtgttataaattcaaagatttcttataatatgttaaaattacttttaagagttgagaagtccaaataaaagcagagagatgagaggaaacactagcactaaatgttcagacacccactgaccacgtcaagctgcacattttgttgctaaacctaagggagagattagatatgaggagagtgggaagcaagaaggtatgaagtctgggtatttagggactaatagaaatgattttctcgattagtttaagaacattagcaattacttacgggataagcacagttaaaggaatttctggaaggaataaaactataaaaattagtcaaattgttaaaatatcagaactgtgtaaaagcatataaagtttcatcatatctttcttttgaaaaacaaacaaacacttcatgttctagccagttgctaatagtgatcagttgatgaatacacctcatgtttcacgcatataaaattttacaccatgtctagtccataggcattagtgtaggagtcagaatacaacctgaattctgttcgcagctttgtgccttgtcgataaagcagtggacatctctccacagggagatatgtttcctcccgtgatatagaggatgttgattcacttgtctcctctctatttcgaaaagatgctctgaagattagtgagacaatggctgtaaagctctttgcactgtttacaacataaatcatacacagacatactggcatgagaaacgctatcatcatctcttttatacatgagaacaaccataaggaaaacaaacctcagagacagtcctgtattataaaaatgttgggtagagatgccaaaagttgtagggtaggaaacagcaacaacaacaacaagacggaatccaaagaatatttgcattctataatatattctacagagtctcagacgggaccttcgttgagtgctcccaagtattatcagtagccatgttttttttttctttttcttttttttttttttttttttggtaaaagggataaatagtgatgtcaggagatgctgcaaaatatattccagtgataagcatatggcaagcaattaatggatgaattcgcctctcttattgccatgttgtgacaaatactctaacttatttggcctttggctccctaaagggtgctcagaaatgctgtttagaaagtacttttcatgaagagctacaacaacaacaaaaacaaatacaattcaaatatctactaaacatatgaaggagtactcactctcattagtaatcagagaaatgcaatgatcccattatagagccctgtcatttgaaaaaaaagaaagaaaatccaagtgttttttattagaacgtggagcaacaggaattctcattaccttctcaaccactttgtcaaatgctttctgcttatctgctgaagttaaagatatgcatgacccatgaatccactcctaggtatattcccccacaaaaatgtacgcttatgtgcatcaagatacacgcacataagtgttcgaaatatctttattcataatatttccaaactggatatgttcaactgcataaagaaagaagattggacagtaaattgtggttcctttatacaacagaatgctatatatcatgatatatattatgatgtgcaatcctcagctacatacaacattgatgaattttacaactataatattgcacaaaaggagcaaaacacaggagtatctacaagatgagtccatttacataaaatgcaaaacaaactaaattgaactgttgttttggcatgcatacatacgtggtaaatcataaagaaaagtaggaaaagtaaaagtaaagtcaagatagtggtgacctatctggagaggatgaaacaggaaattatagggtctttctgaggggtgatcatagtaggtatttactttagaacaatttgttaaacttaaaatttaaattttacatactttcttaaattttgttatatttcacaatttaaaaatttataaaatgataattttacaaagcctaaaagatgaattatttgggggcttttacttctctttcatctgtacaactgctgatgaaaatcaccaggtgtgtataacatgaagcatctccttaaatgacatgcatttattgggaaaaaacacaaagtccaaatggtaaaatgttagcaaggtaaaacactgaagatttttctccccaaaactgccaaacaagtctggtttaactgaaattgacagcaaagacaacagagcacacttaattgaattttaatctcagtgatctctaagccatgtttgaaacataaacagacatgtcagagttctttatgatgttggacatgaattcattttcataattcaaaggcatactttgcttatgaatctctttaacaagctttggctgaatattcttttcttccagatgtttgctgttgtatacacacagcttccatctctttgcagatgatttaaaacatagttagaaagagtacatttatttaacaaaagagtaagagtacagaattcaaatagatcgtctgtgggtgtatataatgatgagtacataagtctcatgcagtcctcataaagacagcatctattaatctgaagaagtttctcttactaatttgcaaacctaaaagcattttacattactaagatattaataaataggtcaattaatacttttgatagagtagagagactcctaaataatggacatgaaaaatgattttgtaaaagtacggtttcattttaaatccctgcttaagcaatttgtaggaggcaagatagtgtggcagttgagaggatggtctctgaaatcagatctgaatttgaataccacctctaccatttactaacctaaacaagtcatattacttctctgtgtctcaatagctacttcctgaggtgttcttacaaaaacacaaataaataatccatgtaaagaactttgcacagtgcaaatacatagtgagcacgcattgagttttatttatcatcatcatcatcttgctgtacttttgtaaactcaccttctcccgtctttttctactctaaggtgctcttccaagctactttcctcctcagctatcgttcccctggatttccagtaagagagggtgaaatcatgcctgcttatcttctttctcttttactgatacttcactgaagtgaaagtaaaggaataaaaacacaacacacccacccacaaaggcacaaataataaaggaaacaagatcagcaaaggagagatttctactgattttttgaaatcagaaaatagctgaagtgccttagcataatcgaggaaatggttacggagagtaaattccaagagaaagtggactaatgtgttctcccgaatccagaaagacttactgcttggaggcagcagaattaaggaaggcaggagtttagcgaggggctgaaagtgtattaaaattatatggagcctttggatccaaactaactacttcccttacctactggaagcggagtctttcttttttggaggaaatcggctagagagatttgaaactgatgatactaggcactgtagcaaactaggagaggctgcaggttgcgaaataggtgcttatttgaaagcctatagagtttgcaataagaaacccaacttttttatttgtcatgctccccagacattagcagtcagttatatgccccaggcgcaaatctcgcaggcagaaagtggggtaccccctaatcatgaccttggggaaacatttcaaagaacacaccggctttgattgaacaacctatgatgcaacagtgcaaccctacagttgacgagccctatccatgatcacagaacttctgacattgtttcttgccatcattgtcattgttgctttgttttgtgtgtgtgtgcatatgcacctgtatatgtcttgcttttaactaagaatgaacagcctcttaaggaaactctccataatgaagaagagaaactagaagaagcaaacatcaactgaagaaagaaatctacaggaaagagagagacagaggaaaacctcaagaggataataatctgtgaccttagataaaacacacttctgacataagaacatataccattaaaaaggagaggatgaggctgggcatgttggctcatgcctgtaatcccagcactttgggaggctgaggtgggcggatcatgaggtcaagagatcgagatcaccctggccaacatggtgaaaccccatctctactaaaaatacaaaaattagctgggtgtggtggcatgctcctgtagtcccagttactcgggaggctgaggcaggagaattgcttgaacctgggaggcagaggttgcagtgagccaagattatgccactgcactccagcctggtgacagagcaagactccgtctcaaaaaaaaaaaaaaaaaaaaaaaaaaaaaggagagaatgagagtgctaaattatttttaaatcatgaccaaaataaacattttaatagtaaggttggaaaataaaaatgtgtgtgaacaaatcttctagaagaccaaaaaacaaaaagacaaaaaaggaagaaaacaattaagaaattaaaggatatgatctaggagatccaactaagataatgagaattcaaggaagaaagaacagagaaaatagagggcataaaattatcaatgaataagagcaaacatttcagaactgaaggactcatatctctggagtgaaaaggtctattgcgtgcccagggcaatggataaaaatgcagaccaagacaattgatcatgaaatgtgggaacttcagtaaagaaaagaaggtcacaaaaatttctacacagaaaaagatcaggatttcaccaatagaaaatactggagtgatgcctacaaaatgttcaaaaaaatacatttttaacatagaatccaattgcagttaatccatgcctgagacaaaaaaaggtttaaacaaagggctgcctctgaatagtatatagaaaagatttctgaacagaaaatcttaaaaactagcttttatccccaacttggatactaaatatagagacaggcaagaattaggggtcttcttgtcattcttctgagactctggagctcctgagacttctttttcactaacaccattgaatccgggaatcaacaagctgcacaaagttataaagattgccagacttcatgtttctggaaaaaaaaaagtactattttttcatacagctgagacctctgaaaagatggctcaatgggcaagatgccatgagaaatcaaagccaaatactcattctgaagtcagttttgctcagactttgtatactgccactcaatttttcaagtcatcagaaacataactaagaatgagtgactttttgctatcaactaatgacccaccattcaacgatcttgtatgacaaagtagaggagtatcttcttatttttaggcttattaaattacaatggaaaatattcattaacaatctcataatgaggcattctagatgcttattcttacctaaagggaatggaacaaaaaataaccaaaaactaaaaagatgaagacaaaagcctttcttggtattatagtattcttttacaaaggatatggtttatcatagtaattgattccctctgttacactagagatactattatattaaatgcctaaaggttaaacttaggtaacagtggagctatagttctttcagaaataaaataattaaatagctatgtatgccaagaaaccttactttgaacatttctattgtaccatctcattattgctggctgcctgattagcaagcagtaaacttgggtaatagctttcctctgatatcacttcaagtctactcgagttctagaattacccagactaccaggactttacttgcacaatatgctgaaatgtttataacattatgctttcccctcctaattctcaagaccattttgataactggctaagactggataatatcaacaaatatgaaataattataagaatcattctttcttaaaataagaagagtttccagaaacagaaactaaaacagaattcaggctaagctgctaaataggctatctcagggattctcagctcattcttgatgaggatagattgctttttatttcccttaagtgttccgtatttatttcacaaatattacttaactgtgtaccatgtacaaagccgtgtgctagttaagctggttactgtggaagaaataaagggagtgggagcatctagcttttttcttcaaaggagatgggggaatctgtgggagttagtggtaggggcacctacagaggaaatagctgaaaaggaggagctggggaagatgaggatgaggaactaagttgtgaataaaggaagggcagagcaatggtttttttaataatattggaatgggatttgtttttagcactgctcccctttcccttaacagtccccttgagctacaaataaatgtaactggcaaagtggataataagacttcagaatcttctagctaaccatgatcaatgtgtcatggagcccagtatacaaggagaggttctatttcatcaagaaatatgactgcacttttagtgggcaattggttgttatgaaggtccagcatttatttcttcttccttttgaaaaataacaccctgatttcctttggggaacatccccatggtcagatgggaccactgtgattgactgattggttcaggagaggggctatacccttaattatgtgggagctactagaaagagatgctctctttttttgttggacataaaaaacctggaaaggtatggcactagattgcagacattggtctgtctcatgtggatagagcagagaatgaagccaaaaatggagagttcttctgatatcaggcatcagggagaaaacaaaacaaaaaacaaacaaaagaataaaaatggagagttcagatacaggacccatagacagagaaactaaatcctcatgaagtgttctaattgaaacagtatctatggtctacctaaacctcatgggaaccacattaaatggcggataaagccattaatatactatacatagaagagatacatccacaaggacatcttaccaagtgtggacacaagtgtgtaacaaccacttattggtgtataatattataatccacaacatcagattttactctttaaattcactagggagtattctcaaaggaatggaagaaacaaagctggctatcagtgaggggcattatgtgggtaaatataagtagaaacttcaaaataaatttcttaaaagcaattttcactttctgaaagtttatatggaattggcaaatgacaaggattgtgatcattgatacatgcaagtcaacaagcaaaactaaccaaagagacaaacagacacatgaataatgaggcagttctgatgaccaaaaaacacaactttacaagactgtttgggtaatttattttgactggtaatacatcatgtcagtttattttatttaagccacagcaacgtttgtcttcctgacgatagttattgcattccagagaagtacaatacgaagtttcagactagtgctgggcttagtcacacagagaactgcagtaggttttctaagcccctgctcactgtatttcacaaaaatctcatcccttctaccctccactctctaaacacacatccaagcaaatcacaccaaggcataatcattgaagaacaccataacttgccaattaaaatttggcaaacagaaacattgaagcaaaactgaaaaaagaatcatgtaattaacttagaagaaagcttttttcttaaatattatttttcttcccattcagcatgcacaagaagcaaactttgagcactaacgtgttcctttttagcctttgcctgtttgtttcaaagacaagaggagaagagtctgcttaaaagccaaatacactgataaatgtttactgataaaatcttccagatgggactactttcaaggaaggtcaattacaagccttgtgtctctccttttaatgatatcctttaatgatccccttcctctcctagaaaattaagtcacaaaaacatcttaggctgagagtgacccagtaatcctcataatcacattgcaatgacagacaagaagatcaaagtacaggtgcagtgagaaatagggttttacatcctattataaaatgtgaacttgccattaaccaaagatcaaatgtacctttaactcccaaattcccaacttccaatattttttaaattctgtggttttctggattaataaactttctctaatataatattccccctcccaatttttgtactaaacattggtggttttttcttcacatatggtgattatgttttcatatatccaataactaaataattttagaaatttggtaaattgtgttgaaactctaatagcactaagaagttcccaagctagttggtaagctattgtctccaatactgcaaagagaaaacctagcaatggaaattacataaagataatctgatgctaatatgttagttagaaagtgaattaggcatctagtaatggcttcaataagaaagaggtttatttttatctcatattaagaaaatgtagcctgggcatgttggctcatgcctttaatcccagcactttgggaagccaaggcaagaggatcacttgagtacatgagtttgagaccagcctgggtaacatagtgagacctcatctctacaaaaaattaaaaaaaaaaaaattgctgggtatggtggcatgcacctgtggttccagctactcgtgaggctgaagtgggagaattgcttgagtgcaggaggctaaggctgcagtaagccctgatcacaccactacactccagcctgggtgacagagaaagactcaaaaaaaaaaaaaaaaaaaagaggaaaggaaaaagaaaagtaaagaaaataatctagaaacaggtcaaggttggaatggtgacaccatgtttatcagggacctaggttcctattatctttctgatccaccatccgtaacacatggcttccattctcaattctgccatttaggttacaagatggctactgatgctccagccagcaccagcaccaaatcactactacacaaacgggaggaggagtaaaagtgagtgcttctaggcaggagctccctctgctaacatgtagttggctgcatcaatctcttagaaagcctgagaaatgcaatcttttgactaggcagatgtcacccaatataattaagattcagtcagtcatctttattatattggttactaaatgaacaaatctgtaaggatattcagtcagcaccagcagtctttgtcacaccatagaatttctcaatcctggatggaatttggtctaatcccttacttacagaaagggaaatggagagcagaaagattaagaaatttcccccaaaggacacaactggttagccaaagaactaggtgcagaattcagatccttgatctatcagtaaagatccggttctttactggagcaaacttcagtgaggtcagcccaggaaattcagctaaccaacatgaacaaataacacatcttactacctgggtcagaccctgtgactcacacttcaggctttacagtcataactgctcatatgctgtaacatccaccctctttggttataaagtgagaatcaccatattcaccacaagtcatgtacatgtttacatggccactaaataaccaacaaaatgagagatgcgccgcaaaatgtgacagtacgagttactgtttgtaaaagagcagaatgttccacactcatgggtaaaaattggtacttgaacttcatgagtgactctagatcttttatggtggtggctttttaaatacagacaaacacatgattatggtatctcctgaaactgacattctcaaaataacatccactattatacaaaggaagtttgaatgttttgaggcttttttgcttttaagccattgctcttacctcttatctcttcttcgattatggccatcacttacttcctcagactccacccagctgcattctcaacaaaccacagtccaggatgagaacttctataatgcatatgcttccttcagcactttgagatacattattaggccctgctctcatgttttacttcttttatgttccaagcttcttgagggcagggccaatactttctttattttccataacacccctcatatgaaaaagattctagcattctttcacaatgtcatgcttagaacattccaatatttttccaacctatctcccaaactgcttcccatggttccactgattctcttctttcacccctactcacaacacagggtacccgagtgattgctccaaaatacagaacacagcaagccacatttctacatctttggcggtgcgccactgtctataaactttttaataaggtcgccctaacttgctttctcacatagtcttattccttgccatttcctctgtttgcgccctacatactgtaagttactccgaaacattcatctttttctacatgcctgtgactttgtacatgtagttccctttgtctgaaatgccctttcttctttcgtttatggagattccaaatggtctccaaggtatatgtcaattattatccatgaaaggttttgctatatatatccagtattttctgggggatggggaagcttaaacaaaaaaaacttgaacattactctacacacagtccattatgacatcttagtctatttggaaaactccactcgtgtagaaattgtgtttatttcagttgactgtgaatacaggttctgatgcacaggagctactcaatagtttgctgaatgaatgaatgtcagttttcctaaacagacttgaatgattttcttgagagtctaactgcttgtcatactacatcttgtctcatttgattctagatccacagaagctagcacagtacttagatgtaaaaattgttatatctcttttgtttttccagttaatcactggagaccagggctgccctttcaataggaaatctaatatctctctttttgaaaactacccctctttcaaataacccaagaacctcagggattattcagtctaaagcagagtcgtgcttctaaacttcaggtgtagagaggacggcaattggtatgaaggcttctgccactgccatgtggtatcacagtgaacaatggtcctgtccagacctgtgtccttgctggtttgggtctccatgcccagccttggactccaagagtttggctctttgatttaactcatttagtaaagatcagccctcactcaacaatctaagatgctcttcttgagcaggcagcttaggtttccccttcctctacacagatacattaatccctctagggcccgccgtatcagcattctctcccgacaatacaccatgggactgccctttttcatccattctcatgggtttcctcagtacttctaattgtgggacaaagtgagaaagtctcttttctcctggtagactcctgaattcttaggtagtttggtccacgctatcctcaaactgtaccaagaggaggggtagcttttaataagaagggggaaattttgtcacactctttctccaaagaaaaagatgacaggccttatgtttatatagctaagggaatccacttaatgatttttccaaaaataataaatacaaaaacccctagcaggttttccaatagtagagttagaagtggacagtcagatagaatttctgcctctccagtcaccctcttacataggcatggtaatatttattgaaattcactataaaggcaaaactggatgaggacaattgagaaactcttgtcctaaatatcttttcctgactggccaaggaaacagtgagtctaataatcaacttttttttttttttaagtgcatagccctaccagtccaataagacaaaaaagattcattccaaaggaaagatctggcatttcagggtcacatttaagtaggagaggatgcatacaataataagatatttcaattagacgacaaagtcagccataggacacagtaccagtagtgtcttttccactaagaattggggaagggaggcttaaaattcaccttatgtttgtttaacaaacataccagggaatccttccttcaactgtgcccatcgagttgagctacacacatacaacataatccaggggagactgccccaaactgaggctttatttactaatttgcagtacctctgaaactgttaattttttccctacttttttttttttttttttttttgagacagacttttgctcttgttgcccaggctggagtgcaatggtatgatctcggcttaccacaacctccgcctcttgggttcaagcgattctcctgcctcagcctcccaagtagctgggattacaggcatgtgccactactcctggctaattttttatttttagtagagatggggtttctccatgttggtcaggctggtctcaaactcccgacctcaggtgatctgcacgcctcggcctcccaaagtgctggggttacaggcatgagccatcgcgcctggcccctacatttttaatgcctctaaaatccagacatgtttttataatcaatggcaccttggacttgatgaaataaagtaatcaaatagttttaataaatcaaatacctttaaaaatataaacaatttaaaaattgttctaagacccaggttccaacctcaggatctggatatgaccataatgctatattagcatattaaagcagagacacagacaatagcggtaacccttcaaaggggaaaaagcctgtcagctgaagatgatagaggaacccagtgcttctcaaagggggttccccatccagcagttcatcagcatcagcatcacttgggaacttataagaaggaaaattctcaggacccaccccagaagtactgaatcagaatttgtggggcatagggctctgtaatctgtgttttaacaagggcatgggtttgagaaccactcatatggtagctaaataaagaagacacttggtcagtatatacttggcatgcctggggagggggagcataacacttaacagccgaatgttaagactaccataaaaggaggaagaatctcaaaacccaatgcaggaaagccctttaaagtctacagttcctagtttctgactccatatatgtcaaagcagcttctaattagaagtttgtttctcaaggggctgaactacaaggacagaatgaactgatctggccaatatggtatcctgtctacttgtcaatatatttctcactgtgaattccctaattcatgttcttgctcttgcataaagttcatgagttctgagtgtcagtgacagcacctgatctaattgggttctgagaaaatcaattctgaacctgaaaaactaaaggtcagtctttgaaatttgtatatattacaaagacccagtccaaaagggcccagaacatacctaatactcatttaaatggagtatttaccaggtcaagagaagtgaagaattaagggcaattaggtcaagattgcaaactggcaatcctcaggccagatctggtccacagatgtgacttgtttggcccacacacgttgttcaaaaatgggaagtttcgcattaaatattggatttcttccagtcttaaaaaagcaaaaaaaaaaaagatttgacaatagggagcccacatcctggcacttgagcactagcctggagctaggcagaagctgtctcctttaaacaggttgtagcttccaggtcaccccagtcccaggaatctttattgacttctggctggcaagcttctccctttatgtgaatatgatctgcctgacccctggtttgagacgagtttgaagacctttgagctacataatcatttttcatggaacagatcattagactgatttgaataaaatgaattgctcagaaaattagctttattttgtacctttagagctatttgtatgtgtgagcagggatgtagaggttagttacttttgaaaacagacagtgatgaaggcaaatgttgccaggcagagtataaagagaaccagcctgggctgtctagacttggatctgccacttactaaatgtaaaactatcccacagccgtggtttgcatatccactaatgggaatgataatatctactatacacagggtttatagtgataatcgaattagataatatatgttcgagactatatagaacctcaaaaatgttagctgaattaaattttgatggttttgttttctgaattttactttagaaattgttcctaacagattacaaacttttgaaaaaacaatcaaaattaaacctcaatagtcttacattgtgatcaaataatggaattaacatttattgactgtaaactatgaaccagatagtatgctgggtgctttaaatacattgtctcatggaacccataaagaattactgagttagtattatctatcttttacacattaaaatccaaggctagaaaagtttaggtaatttaccaaagtcacacagtaagcgttggataaccaaggtccatcttactccaaagcccttacatgtgtgattactgtagtgtttctcaaactaacatgattatacgaatcgcaggctagtagttaaaagcgtaagctctcctatttatttccaagcttactgaaccagaatctaaagggatacatagccttgaaatgtgccacattttaccacagccccatgtaattcacaacagcggcaaggaaactgcttaagaaagctgataagaatcaaagtaagtagaaaaagaattactttgcgttttattcaatagaagaaaggaaagaaagggggaactaggaagaaaaggagggaaggggagggaggaaagaaggaacaaaggaaagagggaaggagagaggaaaagaaagaaaggagggagggaaggagacaggcagaaaatgtcctggagctaaggcctatggcatttgaaggatgatgtgaatgcacttactagatggatgctttctttctaactgcacccagcctgtttactgcaaacataaggaatcagccaacaggaagctcagcttgccactgcagaggagtaaagcactttgaactacaggcattttgtacacccaaattacatactgtgatacacatagtatttgagctgttccgcaagacagaagccaattattcttggcacgtacttctgtcgtgctatccaaatcaccatccctcacatgtggaactgtgccacatcaaacgcaccaagtcacaaattccttaaactctttgagatgaaagtcaaattttggagaaaaaggatagtctggtatatacaccatatagccaaaaagatgtgtgcttaacttagaactgctgggtctattatgagaaaccggggcagcaaaattctgccttaggaacttttcagagttttgtaaactgaatttttccaatgtaattcagtattatcattgccttttctaatcttagttatttcatttatagtattcatcttaaaataattttccagcctctccctttaaatgtttttaagcacagtggaaaaacatagacactaaaacaaggagtagaggttgtaggtaccatcaaattctattgagaatcacagaaactatgcataagtcctgaatggtagcattatttgataatcagatcagttagttaacccactccccttaccccttacaaatcctgaggttaaaggatttaatcaaaactgtcagatgatatgaaaatagaaatcaaatgataattgttaatagtattataaagaatttaaaacataaatcctgcaagattaaaaagcagaaagtggggtattagatgcaccagctttgtgcttcttaagctttaaatatgctgtggaaactcctagaaatcttgttaaattgcagattctgatttagttccaagattctgatttctaacaagcaccgatgtgactggcccaggggtcagactcagtagcgagtgggtcaatttaagaaggcttgcattggtgaagttctagagatgtgatagagaatctccccataggagggagtgtgacctaacactagtaatacctagaaataaaatgtaaagatgaaagacagatggaagtgttcgtgtaagtgtccagttgctccagaagaaattggttacctatgaaatagaaatataatcttagttttaatgtgagaagaattctaagaaagtaaacagatttacaactaatatataattgggtttctcaaacttaagactctgatgaggatactggatcatccacccagaaaaatacagataatgtacatgcacatactgcacacacaattctttacacagtttcaggaagttcactgagcttcctttggaaaggtgtgaactacctaagggctcatatcacaatttaagactaccaatgcacatgtgtagctggtatagaggaacaacttgtagttttaagactaattgatagagagggcagattagaatctgcttatgtgtttgactgatgatgttattgcacaaaggcttatgatttctcagtcacttctgtaaaatataaactggttgaaatgtatatttttccaaggtaagacattaagtatcttcatattaggtaggaaaaaaaccaccatgttaggccgggcgtggtgactcatgcttgtaatcccagcactttgggaggccgaggcagttggatcatgaggtcaggagttcaagaccagcctgaccaacatggtgaaaccctgcctctgctaaaaatgcaaaatcagccgggcgtggtggcgcatgactgtaatcccagctactcaggaggctgaggaaggagaatcgcttgaacccgggaggcggagtttgcggtgagctgagatcgcgccattgcactccagcctggggtacaagaatgaaactccatctcaaaaacaacaacaaccaaaaaacaccacaccattttacaaagttaaatatatactactttggaaaaaacacaagacaaaaatccaggtttgaaaatgactgcacagtacaggggtttctgaagatgtaaagggcaattgttgttttatgctggtagcatacatcagctttttttctccaatagttttgaatatcccaccacctgcctttttaaactagtgagaaattataattatttagagctgtcatttaaaagtcatagaaaaccagttaatgttttttgaaaaaaacagttattgatcacccaatcttagataagcaacttaaaatctaaaagcaagctacatctgtgtgtgtgtgtgcttgtgtgtgtgtgtaaagttatatgtcaagacataatatgaaatatagacataatgctatgagagtgctgagggcatttttctttttcttttttcttttttttgtttgagctggagtcttgctctgtcatccaggctggagtgcagtggcacgatcttggctcgcaacatccgcctcccaggtgcaagtgattctcctgcctcagcctgccaagtaactaagattacaggcattcaccaccatgtctggctaatttttgcatttttagtagagacggggtttcatcatgttggccaggctggtctcgaactcccaaccttcagtgatctgcctgtctcagcctcccaaagtgctgggattacaggcatgagccactgcacctggcaggagtgattatttccaggatgagataatagagatgtatgaaggaaatcactgagttagctctgagctggattcaggatgagtaggatttcagtagaaggagaagtagaggggaggcatttcatataaaggaactcccaaaagcaaaacattatagagggtaagagtggagggaggaatatgctgtttggtctaagaagagaatgatatttcatcatacttgtaatattactacttgtgtaggctcttcttgactcggtttgctttaaccaacagaacacaaaaaattggccacatgccagttctgggcttaaacattaagaaagcctggcttttgtgttcttggcagccctgagttgccagggaagaaattctgactaccttgctggagagttcacatgaggaatccacatggagagagagaaaagccatgagactacatgaagaaagaaagaaagcaggtcatctcagctaagcccagcctccagtctactggagtgactgcagccatattggggaccatgggtaagaccagcaggactgcccggctgagcccagcacagactgcaaaatagaatggttgtgtttcaagacatcactttctggaatagtttgtttgcagcaatagaaaactgaaactgagtgtttatcaacattttaaatcactactgccttttgataaatacaaaatgcgtaaacccaactggagattcagatgtagcactgtccttctacactcactagtcaagacttattttgaattttattattttgtatcctaatcctaaattttgtttaggatacaaaactctaggtttcttctttttacaaataaaaactattataaaagtaaataaccatcaaaaaccattccctgaatcacctcttctattgctcctccttaacagtagcactttagatggattagtgtacatgtgtatgtgcacacatgtgtgtatgtgtgtgcatgtgtgcatggtaatatttggtcatagggaagattaagaaaaggattagggctaaaaggctgaacatagggtgatatcttcggttttagagggaacctaggacagtgtttctcaaaattcttaccttaaaaaatattggccaggtgcggtggctcacgcccgtagtcccagcattttgagaggccaaggcgggccgatcacttgaggtcaggagttctagaccagcctggccaacatggcaaaaccccatctctactaaaaatacaacaacgacaaaaaattagccaggcatggtggcaggtgcctgtaatctcagctactcgggagtctgaggcaggagaatcacttgaaccagggaggcagaggttgcagtagtgagtggagatcgcaccactgcactccagcctgggtgacagagtgagattccttctcaaaaaaaaaaaagaaagaaattaaaaaaaacaaattcataggaactcaatgtgtgtgtgtgtgtgtgtgtgtgtgtgtgtgtgtgtgtgtgtgtgtggtgtaggcctgcctatccatactgaaacagatttataaaagttattccctatgcgtgatacattctcatctttttctactctattccagttctttttttcttactgatagttgtgacccactatatcagtttcataatgcacatagaagttgaggcactcagatgaaaaacactatctaaaggggcattaatcattaaaaaaaattcgttaaatcctgtatgtgccatacattgttctagtcccttggataaaccagtgataaaacaaacacagttccttctttcatggacaaaatagtcattaaacagcaaccacaacaaaacatgcacaaagtatgatttgattacattcataataaatgctgagaaagaaaagtatgggtgctataagaagctctgataaggagacttcactgaatctggagcatttaagtggatcttttcatggatgccaagttaaggaaagcccaaagtaatagaggtcaatctttagaacatttctgatctgccaagggctagcagaggacaattgcaggaggtcgctgaataagccaagtggggtggaagctgggctgacactccgcccaatcctaaagctggctttaggggctggtgcatgctgtagcctattgggcccagctcatattaatcctttccaacaatttttggcttgtgggatctagagaggagaggtcaaggagcaagagtgaagtatcccccttagagtccagaagtaagagaagtaaaattatttaccatctttcaggggcaaattatgagatccatctagagttatgaaaaactgtgtccaagagactcccaggctggacgctgacagtaattacttgaaggtgttaacatatttggaaaaagaaagttcccattagaatgagggtggttggcaagtaaatcaaagacaaaggagacttgccttgtgctgcccatggagagagggagcgcctgtatgagcctcgagagtgtgcccatcctcctgtgatgatctccctactgctcacatgcatgtcctaggccctcaaaactatgaccactgagccttctgatcatatgtaaatctgtctattctaaatccatgttatgtactatttagcattctaaacctacccataagagggagaatgcgtatgttggcaaggccaaaacactttgtagcttttaaggaatcagctgatactctggctttaaggctcttgtgagcttttgagagtttgaatcagcttactcagaggctgtgacaagatcacctttctgagactgcttggttgaggacagattctggaatatagttaattctccagggaaaacactactctgtaaggacctgtctgggtaaccaactgtctttccctaggcgatacccctagtaactcctaacctccaactacacaccattttaaatttaaaatttctacaaggtagcagctccagcatgtacacagcacacagctaactgttgatgaacactgcctaggcattgtttcaagcactatgtagattatcttatttaatccttataccaagggaggtgctatcggtattcctattttaccattatgaaaactgaggttagttgagcaccgtggctcatgcctgtaatcccagcattttgggaggctgaagcaggtggatcacttgagcctaggagtttgagactagcctaagtgtcatggcgagacccgatctttacaaaagatacaaaaattagccaggcatggtggtgcatgcctgtagtcccagctacttgagaggcagaggtgggaagatcgcttgagtccaggaggcagaggctgcagtgagctgagatggtgccactacaccccagactgggcatcagagctagacccagtctcaaaaaagaaaagaaaagaaaactgaggttaggaagcacaaggtctcacagctagtaaatggcagggctgggattcagggcagcctgattccagactgcaacctttaaccaatttatgacattgctcctgtcaatgcctccacacccaggaggatttgaactatgtcaaaaagtccatttgttcctaaactgtggcttgcaaagctacttttctttaaagggagggagggaacaaatgacctctatccatatgctgtgataatctatacacttttcttggtgtctcatagaacttcaatgttttctcccttgggatattcaatgcttcatgcaaactagtgagaagtggctcgttctctaccccaaatcccaccttttcttcttctggcttttctgtggtctcactggggatagttcctgcagattttcaacttgtttcaatttgcctccttccaagctatgactatgcaagcatgatcctggaattgcagaatggtcaacaaaatgctggcttattctctggggaaattctacagttttctagggagatcatagaaagctatttaggatcccactttccaataggctcttgaggttatgattgttccctggatgctttctattgtgcaactgccctaatgtacaactggccatttatacaaattcagtttataactaagacattgttttgagaaaaaaaaagccatactttctttcttttaaaatactgataaagtgtgggatgtttgaatgtgttctccacctgcatttttctattctaaatcccaaggggaatgagacagagaccaaagccacagctttccaagaccacaaagcttgaggtctttgatgttccttatcttctgagtgaaactttcaattatttggcaaagaaaacaaggctcttaatgggaaaccaaagaagccaaatcatctgtgtaacagaactgagtacatcgataattcatttattcaagaatgtactgagcaacctagcatggctgaggcactgttgtgtatatatatctgtatcagtgaacaaaataggcgaagattgttccacatggtagtttccagtctagtacaggagagagataataaacaatagatatagtaaattatgtgttagaaggatagacatgctatgaaacaagcactcatacatacaatagagcagacattgggaatggtattaatgtgcgatgcatttaaaaaatgggatggtcatggatggcctaatggagatgaaacacaagcaaagacttaaagcaatggaattggccctaagataccgggggaaagagcacttcatgcagcaccaaggtcttaaaatggaagtgtgactgatgtgcttgaagatcagcaaggaggctaatgggctggagctgagtgaatgagagaaagaagagttaaaaagaagaccagagatgaaacaggggtcaaattgggctacacgttgtgggccacaataatcacttttaactctgagggaaatgggagccattgcaaggttatgagcagaggaatgacatgatttgcactgactgctgtcttttgaatagactgttatgcagcaagaggagatgcagggtctcctattagacagccactgcaatcatccaagccagagaagatggtggcttgcaataggatggtaaccatggagatggtgacaaggatgctgggctctgggtatattttgagagcagaggcttcaggagttctaatgtattagatacgagatgttctaaaaagagtagacacagggatattctcaagctttggcctgagcaactgagatgaagaatttatggttagagcacattgtgtgggaggcagttggggaaatctataattcaaccctccctcccttccttcctctcttctttctacccttcccttccttttttctttttctcttcctttttctttcttttttttttttttgagacagagtttcgctcttgttgcccaggctggagtgcagtggcgcgatctcagctcaccacaacctctgcctcccagatttaagcgattctcctgcctcagcctcctgagtagctgggattacaggcatgcaccaccacgcatggctaatttttgtatttttagtagcgatggggtttctccatgttggtcaggctggtctcaaactcccaacctcaggtgatccaaccgccttggcctcccaaagtgtctacccttcccttcttccctccttgttctcttccttccaccttccctcacttccttctttccttccttgcatgcacacctgcaaatgccagacattatacccagtgatacaacagatacaaggcatcttcactagcaagccaaatatgaatgataaaataggggtacagaagtagaattgatggtaggggacctactatattctattattcctttcttaaaaatttagattctgatatgagatttgaataattcacatttctgaaccataactctgaaaatacatcaacatttgcacattgattcttcttcaaaaatcatgttaaacctaaacttaggattccattattaaattgatggtatgttttttgcctactctgttatcaaaaacacatcaacaaatcaaaataatcaccgacatgaatgaaacattcattactacatcttagaaattgtgtcttttttgtttctctagacactatctatcaaaatttctgaaaacttagctaactaactgcactatttattggttttattctaagaaacataaagcgaagtggtacactctggtagaaaggatgccctagggtacaacaaaaggcagataagcattgtgttaggtgaccaatcttggaaacagactgccaaaggtggactcctggctctgtttcttactacttgtgtgaccctggcctagtatttcactcctccgggcctcagtttccacaactatgaaataagaacaataatgtatccaatctcacagatttgtggtgaggattatgcaaagtccttaaagagtgtggcacatagtaagctgtccataaatggcattacatattgagatattgagtgtaactaggccactgttactgctactaccatacactagaaaattctctcctccctttccaagagctaatttttatcactgatattatatacccttttgggggtcattttcaatagtcatttcttaagaaaaaagcaacaagagaaataaagttgcaaagatgatgtaaatgtttaacattattagttaaataactgctagaacatgagcaactacaaaaataattttgaagtatactttgatgcagaaaaattttttttttgttaaatgggaaaaatgtgttatagcagtaagtcaccaaatatgatccctttaaatatatacaagtatacaaacatttggaaggatttaaagtatatattaatggtggcaatccttacatggataaatttatagagttttgatgcttttatgacgtatttttattttattttctgaacatgatagctgggtagtgtcaccaactgagatatataaggaggcacaaatttagaggaaaagctaaatttggttttggatatgaagaattttataaacccatgggatactcagttgggaatttccaataaatattggggttccaagctttgcagaagaggttaagatggatttctatataaatttaggggctttcagcaaacaggtggtaattaaaataagaatgcacaagtcagtcttggaagacacacagagtgaggaaagcaggaatggagaatgggatcctgggaaccccaggtcaaaggaagggtggggggaaaggaaaagaaagagtgtacgacctcatgcaaagatggaaaggtttttgagagggatacactggcaattgacttagagaaacttgatgagaaatgaactgaaaaatatctacttggtttggcaattgggagagcagaggaactacagcagtagttgcaacagagtggtggggctgcaagctaacttcaagggggtagaggaataagtggggggaaaagaaaaagaaaatgataagtgtaaactttctagaagtttgggtgcgaaaatcaatagagatatgtggtaataactgatggaagatacaggatcaaagaggaagggaattttttccttaggaacttcaaccagttttgaaggagatgcagccatcaaagagtaggtcaaagaaagagggagaaggggcgatagatggagcaatgtccaggaggagacattgaaggggatggggattaaatttgggggtagtcttacttttaagtgcactaaacagaaatcttaccataatatagaagagcaatacagattgagcaaaatataattttgtattttttgatgatttggggtcatcagtttgaacaccaaaaattatactcagttgtccagacaggatgcgctcagtgtttccaaagatgggttgagcttattgcccctttcaaaaaggccccaaatagctatgtctgtggttttcaaatgattttgtagattttctttttctgttgttgttttcaggccatcagctgacatttggctaatatcagttgtgactttccctgaaatctcctacccagcctttcttaatttgcttcatccaattatagaaggtttagaaccacatgaccaagcttgtatgaatcatcactaaaatatgaacatacatttctctggctaatgacctacattatcttcagtgagtgaacattgtgaacatctattttgagtgcttagagacctcctttgcttccttccttatgctgatctatgttctagaagaaaggggacactattagggttgcaggctaagttcttaatagttaggatgtatattgttattaataattgaggtataatagatatcatgcttatcaacacataatgtacatatagagaaaaggttaatggaccactctgagcttacttatcaaagtctactgctcttccacaaaacctacatggtttgttgaacaatttcttcagtcttctgcaagccataatctatgattacataaataattaataatagttttaaaataactttgcaatgattttggttgtttagatccccaacaatgtaaatctcacaatcttctggcagatttataattattaatggaaaacacatttcttatctcagtcgatgaattagcgtttgctgtagtcctaataaatatatatagtaaatataatatacagccaaaaaatgtgtaaacgtacaggaaataaaatgggaatctttgtccaaattcattagcaacctgttttcagcatatatagtactgaaccacattataatgttttttgagcacatatattcaagaaattaaaattgtataaagcatacaattccccattatataatcagagtaaacaagaaggaatgatttccaggaagctcatcccttggattgttttctatgtatatgctacatgtaatttatattgtatgacgatgatacaaacgaattttttttgccttctgaccctgatttcccaaactttcacagctcagacctgcagagacaggttttaaaaacaacatttggcaagaacatgtgcaaacgtgatcaatgagcatcgaggtacacgtatattttactacctttcctttcttactcagagtgcttttaaaaatcagcataactgcaataaaaagaacccacaactgccctattattgaattacaaagcaatgtgtgtcggaaacacccctcagcattttaagagggtcaaaaggaagatgctctgcacgtactccacggctgcaggaattctggtgaaaggagataccaacccagagctgtttaaatgatgacgctgcagccaggcaagaagtagagaaagtgactggaaagctggattgcaggcagaacaaggaatggtgggggtggtgacaaagtggactgcgaaaggacagaaatgacagcaggaatgagaaggatttcagatgtgctactatgatagacgtcccattccaagtctccatgtttcaagcaagtttttaaaaagtttcaagaaagatgactttctgcaagatgagaggttgctttaggcacctaatttcaaataactaacaacagctggtaattattcaatacaatcattagcaacaataacagcaagactaaataccaataaaaatactttatagtacacagtggctccatgtgccagttccttcatcttaatttctctacgtttagccactaatttctttggcttcacagtggctttacccaacatcccaggatacaatttctcaccacagaagttacaaatttccaagattactgctgaattgaattactctcacttacatgaggcaggtctcttattctattctggggtctcactgctatcaataattcaactttttataaaaacaaaatcttccttaaaaattgcttttgtcaaaacattgctatgaccatctgtttttaaaaaccattaatggctgtctactaactttaatgtaacaaaatgtattagtttgacagaccaaggctttcatggcctaaattttacctggaccctccactacagacggccacacttgtcacacacatacatgatccaatatttgtgcatcacggtgggagtgtttgttcctttttatttacatttcttatctataagtcccaactcaagccttacttccccctggagcatttcctggctaagctggctctcaactctctcttcttctttgtagtacttatatgactttttggttctattatttgacattgagaactgcagaatcgctgttgcaggaatatgctggaactggatcttgttaagtgttaaagattcaagaattctgcaaaagaactgttgaaccagtggtagcttggaaccagccatgggaggagtatttgcaccatggccatagacaaacactgcagatcaggtttttaactttttttttttttttgtgaggggtggtgggatggtgagaaaaggaggaaggagaactggcttgctagcataccacacaatagattgtcaaattcttcttactacatttaaaatattttgtcaactctctactatagctttccagtataaattcaaatgcttccgggactaagtaattcatgacctctcaaggagttaaattccaacatggacatgtatctatgtacacacattaaagtgtaggctccataatagctagctattttgtattcttcatggtgcccggcacagtgtgtggtaaaaagagatccttctacctttctagcctcagtttccagggcttacattgccctttaacttctggccttattgaaccttggaattgtttcttgaacgtatcaggtatgtcttaccttggtaactttccaaaggccacttacttgccatggctggcccaggctgactgaatccctcctgccactgagtgaccctgtggctttaacaggcctttcaacacgttgtattttaattgtctatcaattcaaccacctctctgctatacaataagctgcttaagtgttattttttccacctgcgtatctcatggctgaggtccccagcatatagaaggtactccaataaatatttattcatagtgaatagagcaattcaaacaaattaatttatataaggtaggtctgctctagcacttttccacaatattgattactcaaaaaaaataggcctcatggactttatgacactgttgcaactacacagcaaccatcgaacataaatttcaaagaggagagagtttatttacaattctatgagcactttaagttttgctttcttcccaggcactgagggagtatccctgaggttgttctcctctctttgtgtttagatgtctgtacttgctggtatgcctctgtcctctttctgccctgcttccacaccaatggcagacgcaccacaattcaagtgaaacctggtttatccccaagaagtcttcacagttgttctgttggtctctgcttaataccacacaaataaaacttaggccagaggacttgggagagtgaatgaatgaaacaaggaagaatggaggaaaaaatataaaagtaaagtaaggcatgagagaattgtataaagtggggtggggaggatacaatttaaactgtttttaagaaaagatataaaagtaaagtgaggcatgagagaattgtataaactggcgtggagaagatgaaattaaaaaaagcttctgagaaccaaatgaggttgtaatactccaaaattcttaattcaaatgttcttcctgcctcctttaaggttcaaaagatagctggcgtgaccatattcacgaaagtgaatttctctttaaattgccaaaatcttattatcattattattactattatttttggtttacagatccaggaatctttctaatgatggagaagcaaaataagaataaaatgcattttataaaaatcctaattttaaataccaagagagaagaggaaatttatgctctctatatattgtataggggctaccagcatatggcctctgtccacagaagtacatttatctgggaaattgaaataattatttagtgagctcaggcaaaagtaagttctaacaccagagcagaggacatagcctaatttcatgaaagctgatttattattgtttataaaacaccaaattgtcattacattttctaccctacgtataacttgtgtttttccagtggtgctaatatgacaaaggaaataatggaagactatcataaagaaagcttaaaatatggtgacttttacatcagtaacactatttttcaatcattgagtcctgctgtgcatcttgacattagctcttcaatcatactccaaatggagtaaaaattatcagtagaggaaacattctatgatccatttcaattccactacctttcccactgttcatattcagagaaatggatatgaagtgctagagacaagagcagaacaaattaaaattctgctttttctgtgtgtcattgctttttgagatggggtcttgttctgctgcataggccagtgtgcagtggtgggatcatggctcattgtaacctcaaactcctgggctcaagggatcctccaggctcagcctcccaagtagttgggactgcagacatgcactactctgcttggctaatttttttattcttagtagagtctgttccccaggctggtctcaaactcctggccttaagtgatcctcctacatcggcctcccgaagcaccaggattacaggtgtgagccaccaagctcaatcaaaagtcctacctataaactaaagttccacagagactgatggttaaaaatgcaaattgaaatcaaatcagcaacactctaaaatctgaaaagattcattatttctccaccagaacactttttataaacaagctgaaggttactttaattttgttcaaggttgtgtcctacctttctttgatctatcccacagcatatagtcaagtggtagccccatgacgtgcacttcactaagaggaggtcagagttatccattcattcattgattaaatacatatgaatcaagtctatgtgtcaggcactttgagtatcaacaattccaaaatcaacaagacacaatgtaagctctcaagaacatcacagtttatggtagccaagaccatttttaaaaaaattgataaacatctactctgatgtacttagtgcccaattctttctccctttctctttaaaaaaaaaaattattgtactgctcaaagcaatctacagattcaatgcaatccctatcaaaaccaatgtcatttttcacagaaataaaaaaaaacttaaaatttctatggaaccaaaaaaaaagcacaactaaccaaagcaatcctgagcaaaaagaacaaagctgaatatatcacactacctgacttcaagatatgttacaacgctatagtaacaaaagcaacatggtataaaaacagacacatagaccaatggaataatacagagagcctggaaacaaatccacatttttacagagtggactgatagatttagagtagacagagagcataatgatagatacatttgattttctataaaggcaccaagaatatacattagggaaaggagatctcttcaataaatgatgctggaaaaactggacacccataagcagaagaatgaaagtagacccctatctctcaccatacaaaaatcaactcaagatggattaaagacttaaacataaaactgctagaagaaaacacagaagaaacacttcaggacattggtctaggcaaagattttatggctaaaacctcaaaagcacaggccacacgaccaaaaatagataaatggggctgtattgaactaaaaatttctgtatagcacagcaaagcaaacaatcaagagagtgaagagacaatctattaaatgggagaaaatatttgcaaactactcatctgacaagggaataatattcagaatatattaggaactcaaacgtctcaatagtaaaaaagcacacaatcccattaaaagtggacaaaggacataaataggcatttctcaaaagaagacatacaaatgtccaatatgaaaaaatgctcaacatcactaataatcaaggaaatgcaaattgataccacaatgagatatcatcttaccccagttagagggctattattaaaaatgcaaaaaataataaaaaataaaaaaaaaataacagatgctggctaggatgcagagaaaagggaactcttacatatcaccagtgggaatgtaaattagtacagccactatgaaaaccagcatggagatttctcaaaaaactaaaaatagaactaaccactatgtccggcaatctcactactgggtatttatccaaaggaaaagaaattggtgtatcaaagagatacctacatccccaagtttattgcagcactatacagaatagcaaagatggagaatcaacctaagggtccctcaacagatgaatggataaagaaaatgtggtatacggccaggcacagtggcttatgcctgcaatcccagcacttttggaggccgagacgggcggatcacgtggtcaggagatccagaccagcctggccaatatggtgaaaccccatctcttcttaaaatacaaaaattagccgggcatggtggcactcgcctgtagtcccagctacttgggaggctgaggcagaagaattgcttgaacccgggaggcggaggttgcagtgagctgagatggcaccattgcactccagcctggatgacagagcaagactctatctcaaaaaaaaaaaaaaaaaaaaaaaaagcaagaaagaaaggaagaaagaaagaaaacatggtatacacaatggaatatgattcagccataaaaaagaataaaatcgtcatttacagcaacatggatggaactggagatctttatgttaagtgaaataaactgggcacagaaagataaatatcacatgttctcacatatgcaggggctaaaaaacttgaactcatgaaggtagaccgatagataccagagcctgggaggagtgtgtaggtgggaggggaggggatgaagagattgattaatgggtgcaaacacacagatagaataagctctaatgttccatagcagattaggtgactagagttaacaacaggtattgcatatttcaaaatagctagaaagaggacacacaggcatgataaatacttgaggtgatggataccgtaaataccccgattccatcattatacatattgtgtatgtaacaaaacatcacatgaaccccataaatatatacagtaattatgcaccaacaaagataatttactgaagtgaaattcatatcacataaacttaaaaatagtaaagtcaagaattcagtggcatttagcacatttacaatgttgtgcaaccaccacctctatctagttccaaacattttcaacattccaaagtaaaaccccttacctattaagaagttcttttctcaagaccacttttaacttcaatgtatgggaagccttcatttcgaaacaggttttgaaaaaaattctatgcccacaatcacttaacttaaatattagaattgagactaatggagtcaaagagtcctgtaacatcagacacagcctcttagggtttttaaaatggcattctgcattctctgttttttttgtttttttttttctttggttttggttttttcagtctgtcaattttccagattcctatctcccaaagccggtagatgtctcctttgatccagtagctaaggcatggttgaactgatcatatttataccgaatttccaaagatcaatcaacgagaattctcgggtctatgtgcttgtttatttagccctgcctctatgcctgaacttcatctggaagtcacacatagtcttctttctgtcttcagccatgagcaatagtgtatttgcactaaaaacgtttccatggcatcttcttctttatttaattttctatcagcagacccttctttgatacttcctttttctgcccattctggtaattcagttgactaaaacacaaaactcttcccaggtaatctttgtttccctttcataatctgccgtttatacatctacttaattcataattttgctaaacatctccaattatttgttcctacattgttatcttgccatcaaaatattgattttaatacctgtgacccctccagtccatttaaaatattaattaccaagtttcctgccttggatattggagttcttaatactaacatcaaaccaaatgttttatcctcatttctaaagctctactccattgcagacaccgtgacatctaacacttagcagatagaaaaaaagtatgccattgtaaatctgaaaacttctgggcttgcatgtcagagactggaagtggtttgtttgaaaggagcttatactgaggcagcatagcataacacagtggttaaaagcaagtctgtgaaagtgagaaagactggggtccaaatcttggctctaacacttctaagctacgtgactctgggcaagttgcttaaattccctgagcaccagctttctcatctgtatgatgtaaaaaaaagagcagcactgtttagtaaacatggtcttggctttataccacttcctaatatttctacaactgtcaagtcaatcaacatgttaccttagaaactgtggaaaaggtataacctttggaaaatgtaatcaggggggaacaacttttcctagcccaagtccagcttctggttctgccctgacaggtatctgtaagttataatgttttactaggtcttcatttccttacttataaactgagggaggttgagtgaggagttctatttgtttgcattttggctctgcaattcaggggttttatttgacacgtgaggaccaaggagtagaaaggagcaatcaagtgcagtggtttggtcaagatcacataaaaagtcttgctgtaaaaccaggagctagtcctaaactgctcaccagcaagcttgatttatactcgagtagaccatattctcttgctcctccagctgcagctccactcctcatttatcttagcccaggctgactctaagctgctttcacttctacctcactgcatttcgccctgataattttgtagcttacctagcctccctctttgagatcccttcttaaaagggtcattctattaacctacccatatcagttactttactactgctgatctatcgctacctgtcaattcatgggaattacagggtgcactgggacaagagtaaaatgatccaacaaacataatgttgcatttaaaaaaataagctaaaagatactgatgactttttataactacaacatattcgtttgtgaataagaacatatatagtaaaaagatgaaaatgtgaacaggttgactatttcctaaatttatggcagaggttgttctggagaggatggaagaaaaatgaggctggcagtgatggtggggaaatgcaacctccaaaattatctatctatatatttttattaaaaacacccacagtaattatggcaaatgttaatgtttgtttgttctaggttttggatacatttaagatctcttgctttctgggtacatttcttttcttttcttttctttttttttcaaattaattccaaaagacttatatctgctacatgaagaacgaagcaagttcagctctcttgctgaaatgttcaaatgctgaggcaaggcctgtactacaaatttgtgtaaccaaaaccacagtgctctcaatgctcctagtgttgcattacagcagttagaagagattgagctattttgtttccatggctcattaagctagagttagactggtgtccataatcaaatttactgcacttacccttgcttcttccctatgaagtacagccagaccttagggaaaatctcaactattccaggtccatggtaatttggtccacgaaagaaattaacacacctgaaaaggattaaattatttttccttttcaaaatgatcctcttccttaagcttcctctgtcaattgactgccaaccttatttgctaattcccatccctcatcgggcttcctagcacttcctgctgcaaattagtgtgcagtgaacctgagcctgctctccaaaacacatccagactcttggggctttctgggcttccgctagggtgcctggtgcaaagggggcctaaatcaatcaattaaggcctgggaagattccaggcaagaggaagggatatcttgggggacaaaaggaatgtgtaggtgggaagaagggagaaagtctttcttcgtttttcactgcaggaaatgatctggacagagagcaattcgaatcatagacagggagggttgggcaggatgcgatgggggagcgaatgacagacacaagtgacaggaacaacttagggagacaggtcagaaaacatctaatctaggcacatagcagaaatagtgaagggaattgaaacagttgttctgtattttgttcacagtgttaaagtcaaagtcagtgctttttaacctcatgggatggagcgggggagggggcacaaggagccttgtgtgaaggctctggctctgcttattgatcccccaaatacaataatacatcctcacaatcataaatttgagagcaaggggctctgatcctgtgatatacaatctaggcccttattggatcctggaactgattttcagaatcctttattcttttaagtacaattgtaaaaaaaaaaaaagagagagagagagagagagagaaagcaaggaagaaaggaaaaaaggaagggaagaaggaaggaaggaaaaaaggaagaaaggaaagaagggttccatttataaacctcagacaaaacaaaaatgaaagcaaaagagaacaaaaaatagccaatacgacccaagttacaaatttacttgtatcctttcagaggataacccaaattcctgcaagacaattagccatctttctttcgattattacagtaagcaagacgggttaagagtatatagtaaatgtgctttgctaaactccttctccctttattgactctatcacaagaagcacacttaatataatttttacaattttttaaagaacaaataggaaagaggagaaggttgtactttagctacctttgtgtatttgaaaggaatgctgttcagggcttcttccttttcaaaaagaaacaggtctttgaaaacgaagaatcattactgtgcatatctctcgagggctgctcctctagtatcagtccatttgaaataggagtttcacataattcaatttattaaacccacatttcctgccagattttgctttatgtgcctatgtccttttgtttcccggctaacatttccacatctcggaaatcattctttctagtataactgaagaatatggatattaaaatcagatcagcaaaagatttttatggacttggaaagctgcccattaatgccgtaaaataaagcgtgttatacagctgatatcatcagttctactctatgttgttttcatattcctggcggtgggtggagagttagagtggaacaattaggagtgggaaagagaatgaaaggattcgatcaattgtggaatttcaaagcggagacaatttacactaaagaattcaaagacttcgtaacctccaagacattttccagtccaggtaaccgttgaattatagctggaggtgatgttcttggagctgcctgtgaaagctgaaatcacaacatgcctgcagtgttcccttcctaaaccaactttgccattttctcaggcagacacacaaacatgcaagcgtccacagtaatgtgcgtgtgtgagggatgggggaagagtgattgttgctttgtagtagctcctttgaagtgtttaattcctcccttgtaatctcttcatcaacacacatttaaagcatatcagttttacctcagcaatttgattctcagaggcttatgtggctcagggcctctgtccagcacctgggtggcacagtttgttttatgtgcatgcagaagtgttaacagaattaatttttttccttctttctctctttcttcttcccccacctcccccaatttaggttaatgagcccaggcagcagtgtgtgtgagtgagcgggcgtgtgcacaggagggccgtgagcctgcctttttaaaatacaggaaacgcatagaagaaagaagagttcagctggagccacgacttccctctttgcttctttccctccccacccccccaccccccacctcaccccccacactccagcaccggcttttaattttcaaaagcactgcaattgcttggtgtggtttcaagagctggggtgccattctccctgatgatgactctgctgacgtcaatggcattcttatcatgcctagtgcgacatcagaaaccagtcctcagaggctcctcttattcacagtgcctgggctctcagcaaaatgtggaccggattctgaaacgcaaaggactccccgttcctaatcagcgctgcaatccaccagacagtctccttctgccggcagcttgccagttaagactttgttccttagcgttctgtcctgcaaggaccccctgaaggagaagagagggctaagtggatcacagcgtgtcctccgtgtctgagctttcagagccgtgtgtgtgtgtgtgtgtgtgtgtgtgtgtgtgtgtgtccctcaaccaaggttagagactagtcaatgctgcttctgattattcttcaggttttactaaaaggcttcagtctttgatataaggctattcccccgacacagtggctaagaccctcttgtgtaagtgctcctagctcactctctggatcagaaccagcgcccaggtccccacgtgaagcccatattcaccccagatggcagcatgcacctcctctcctttttttaataaagaaaaagaaataggaggttgggaggagaaggaaaataatcatagctgaataataatagcagaataggaaaatagtatcactaagaattaaatatttcactctaaatactcatgacttgttaagaggtctgctctcaaaagctgaattcacaagggagttaatacatactaaacccagtatgcattcctacctagcagtttgggggcaattattatggggatgatgaactttctccatttacagtggagtgtattatggtccaaatctaccctaaagcatttgggaaatgtctacagttcaaattaagatgtttagagtcaaggtcatttcgcttgatgatggaatgatacatgtctagttagatttcatctgaccaatctttgacacaaacacatcagaattgtcttggtatccaccaaccaaataatgtttgtttctcttgaagattgctgagtgacccatagtaagcttattaggagattaggagcaactgttccagagagaagctgtttaacaacatatgaaatgtgcaacataattccatctagaactatttagaatcataacatggaagaacagcagcttacacctggttcaacccttctacctttaagtgaggaaactgatgcccaaaggctgcgtcatgctttactcaaggtcatccacctattaagaggcaggactgacaaactaaagctgtctctctctaaatggtatgcttttcctactacaacacatagctcctgattattcaaaacctaatgaccaaacctcaaacccacttgccaagggagtttccatttttcttttaaatctgagcaatatttcttaattttttgattaaagtgatatttcaggaatgtttagatgaattataatgagtttctcctttgttttcagtgagtttcacaactagtgtaaaggttattaagtagaatggaacaaaataatatatgttggaatgcatgaaattcagatggttttgttctttgttattttttgtagagacagcatctccctatgttgcccaggctggtctcaaactcctgggctcaagtaatcctcctgccttgcctcccaaagtgctgagattacagatgtaagccactgagcccagcaaagacgtgtttttaaaaagtgatgatgggctctgggaagaaggagcaaagatttatctgggttccaaatgtatgagctccctgagcccagccatcattctgcttcatctactacatagctctcaccatggtttgtaacattgcttgctaatatattttatttgccacctaattcaagccattaagttaatattcgattatataaatatgatctttatagttactttttccctatccccaatagttttgccttctcttcagaggactgtaactgcttctataaatcaccttttgctactctctttttggtagacgtgcatcacattctggtcgcgaatggtgaggagatggggcagatgctggttttagagtcagacaaacctgtgttggaaacctggcttaaccacttgctactatataatttcaagacataacttctctgagcctcagtttccttatctataaaatatgaccctaccttgcagggttattgaaagggttagagatgatgtttactaaagtcctatcacaatgcctagcacataggagaaactcaatcaaggataattttattaatgatttttaaaaaataaatggggaaaatcataaaattaataaagattagtaagattgaacaaaggacatatagtatttccccccttataaccagagctgttcctcagtaccactaaaattggaaggacaatatttctttaaagaatttttctagtgaaaagctaagccaaatatatgatcattggcctgcattatgaatgcatgtttcactgagtatctgattataattggatgtcaaatagctacaaaacctaattgtggtctcaaaaattgtctcttctccctgagacaaacatccaatatttcctaggtgataactaagctttgtgtacactgagataagacgccaaatcaattccttaaacttaaaggcacaaaggtttcggaaagcctcattgtccatttgagagacaagccacggcatctcgtaaagcacattttcactgtatactatgttactacaaaattgagttaatttcattaataacaaaatttatcaaaataaaaatgctttctcctttgcaggaatccataaataacataaaataataatagcattttaactcagaagcaaattacagccatgactgtttaagttggctaacccaaatttcgtaagtgaaactggagtggtctgcgtaagtcctagattgcatatgattcagggaaacccagatgtcaaaagggtgtgtgaatcaaaagaaggtattcatcttggtgatttagccctgaaccaatcaattcttcccagagcactggagaaaaagttcttgtttctaatggaatcatcctgcccttacctacctagtaaaaattttgtacccaatcaataccttagtcaactttaaattcctgaatagcccttctgcctcattcaagtgaatggaaagaaaaggtttaatcatatttaaatactccagactattgagtaaagttaaatgcaaatttggtcatgttattcccttctttaaaaccatccattcattagtgatgatccattcacctaactatgccctcagcaggcagggctgttagcctgaggaaggggtgcccttttctatttcatccagctagaagatggccctttggaatctatctgctcaatgatattgtatttctagaatataaaaaagatgccttaaatatacaaaaggcacagggggagtcctttttaggtctcagtttaaggctgatttctgagttggttatatgctctcacagcaatttgtatgttgccttcatggtgcttaaggcagttcaatcatacattttgtttttctttcccctactagagtataaggtagaaattgtgactatatttttcactttcgtatccccaactccatcccagtgcctagtacacaagtaccaggtactttattgactgatacacaagtactagtgaattaaaaaattgttatataaagttgggttgttgtcttgtccaatagtagctgtgtttcgcactgcaagtcatttttgagagcatatgaaataactctatgtcctcatgaatgactttatcataatcattcctgaacagcacgggcgtgtggtattccaaaagggagttttactggcccttggttaaatttaaagaaataataaggccaatttaaaacacacacacacacacacacacacacacacacacacacacacacacacattaatgagagatttctaagccccccatgggagatgactgccctttttgtccttgttttgcatattaaaagtatatagaatgtggaaaataaatgtcataatatgaaatcatggttccagtatatgttagtgtgttctgttgaaaatagttttgtttggcaaaaatgaagagttggtaattgtatgttgggcctcacagttttttgttttgaaattccaaagtctgggaaccattgacttagcagggttttcccatcagaacacagatttgagggtttttaaggatacatgtcttagtttctagtcgcgtatggctccaacctacaatccttccttctttcgggtcccacctttattttttacttttctgatagttcccacaactttgcccacaaagttgccaattcctaaatattattatcaaagtgcaattttgtataccccaaagctaatatataattaattttactataagagaaatcagttaaaatgtaaaaagtttaataatatacattataataatggccctggtacactcccccaccgttctttggaataagcaaaggtataacccttgaaagtaaaattaacttttctttgcacatattagacttctcaatggtgtgccaaagagtggagatgacaggtgagccaagctattgatttcccttggctcttgtcgctagtgggtgggagactgaacacaagccacatcctttatttactgcagttttcgtagaaatatagttatcagcgtatgtcatgaaggaacaaatgtggggaagtactgacctaaataacttttacgtgattcagtatacatgtaaattgaaataaagaatattaaatctcaaaactatccagaggaccttattcaatggtataatatttcaaatttaattttttattacagtatattttcaggtacagttttaaaaatggggagcatgcaattaacgaatacataaaaataacactagtttaatcttccctttaagaaaagttcctgtttgctattcctgttacatatacaggcataggacttcatggcctttaagacatgttgataatattaacatttccacttgattgtgggaagtagcattcattttcagctttgcttagagcttattaacctgatgtcaacaagatatactagaaatgtccttgtcagtccaaacccacaagtagaaatgatcatgttgttgaatgtgttcagtctgatttgacaacggtaacaagtcaacactgttctgctaaaggaaggtcaatcatcccattgcaccagggatttctttatttcttttgctaacattagcattatgaccagtgtatgtcaaagaatacattgggataaaaaattctgcttgtccatttctgtttttccattctcttatgacttagagaattgaaaaattaatctcaatttttttctgtctgtaaatatacaatatatatatacacacactcttacacaaaatctctgaaaatgctgtcacatgcatgaaacacaaaatgaaaaaggtagagattttttcataaacatgaaacagaaaaaactttcctcctcactacaattcatagctaggattcatgattttctagtaagagtagcaaaatggatgccgattctatggcatagaagaccaatggctttagacctggattcaaattttaactctgccacttcctagcttggtgaagataagcaagttaagtcttagttttctcatttgtaaattggagtccatagagtcgtgaggatttcacaaggtaatttatttgaagcatttggcacaacacctggtacaaattaggaactcaagcaacagaagacacagcattaaaatacagtgcactacatcaggacattacaaaagcttaatttaataaatctcttgtctgattcattctaattctgctagtatactgtagaaaagtacactaggtcctgtttgtggcctccccaggtcagctctgcccaccctaccccttgggcataagccactctcccagtttcccaggcatgccacagcagccccagtaaagcagcggttatcactgcaattgcctcatgttttccacctccccatccttgcgggcttagcgtgggcaatggcctctgacttgacaggaaccatccagctacacgtgagatggacaaaggctctgtattccccagggactctgggagggccaagggtaccatggagcaaactttgaccaatgagagacaaaagacctatgcacagaaaaattgctcaccctttcttctccatgtggaatgttttacgacacagcctcacaggcaatgtcccttgtaacttagcaactagttttgttgttgttgttgttgttgttgttgttgggaagctctgacaagcttagtaatgcattaccttgtacatggtttctcttcttccctactgctgttcctttcaccccctcaactccacttttgctttcttgggattgcatgactcacctccctcataaagctagcatgtaagctgtccctagggaatttgatcaaaaactgtgagatttagaaaaaaagatgaggcaactagatacagtacaagaatgaaagagaaaaagtcataatatttgacatcaatttacttatctatgattccttggattctctcagtagtggaagctcttaagaccacattaccaccttattaacaaagaataactgataaaatcaacgggacaatgggcctttgagaacaaaccatcattaattttgttccacagagtccaatttcaattataacctaagatatgtttggaaccacttaatgctattttatgagagagagacagttttctctttgaaaagtcatgttcctttgaatttaactaaaacgtaacaggatgttaaaacgaaaccctggcatttttctttccttcagaaatatgcccacattttatagagaaagctatatattgaggttctgcaaacaacaaaatgcaattttcacattaaacatggattctaacatctggcatttctcctagtgcttgcacataattatccaaaattgcagtttttccaacaggggacccacagtggtagctctgattcattccacattatatatatgaccctttctcatagtgagggtggtcttcaacaccaatgctcctgactgctatcttccttcaacttacatggaatacttttcctcatggctccaaatgtatgagctctaggttgttattcagggttctttcatcctcattttttgtaccttttatgactactttctgaaaaggcacatttgctgagttggcgcctcacaggtggtttggtttgtggcatattttaatagctatgaaaccatgagttcagctattgggttgcaatgagttacataatgcatgtgcaattcagtgcgcaccaacaagaagattttcctaagaccccaaatgacccaggaaacggacacattgaaggggttgcacctcaccaaatgtccctgacaaggatgcacttatttggaaggatgtgcccttactctgaaggctggtggtctgaggagagtagatgtggtaatcatccaactacattaaggcacatttatttctgttgctttttggttcattttattttgatttggtttgttttctgttcttagcaatcagtccattttatgagtactttggcaagtagtagcaaaagctgttttctctaggaaatttttaacctttcaaacacagcagagatgttagggacattataaattcaattaaatgtggtccctgtttctggggttgatggtcataaccatttttctttttcttaccactccagtttaatttacttggaatgaaaaaagtaaatctgagcttctgaggattatcagttgagattctgggcctttaaacacaatcctctctggtctggacttatttgcaacccagcacttccagaaatgcccatcattagctcaggaggatgaactccaaataatccacgttctatttatctcattattctctatatttatgtattcattcaatacgtatatctcccatacgccagcactatgcagatgatagggacatcattttgaacaaaacagaaaaaccactgcctgaagatactgggccatgaaattctgttcaaagatatgttttggcattcattttgcaaatctctacatagcatgaggaggaatgaaaagaataaattatatccttcacttattcatgcattcgttgtccatttatttaaaaaacatttattgagaatctattttgtgataggtactgcaccgaatgccaggaaaaacaagcataaaagatacagggtgtccagaaaccatctgaaaggatgaatttgactactcaaatattttaaaagactaaatgataaaaaaaaaaaaccctaaacaaattaaaattttttgaaaagtttacacaaatgaggagagttcattttcttaatatactcaaaacattaacatatccataaaaaataaactcctcaagataattgattcaatgagtctttggaggtaggagggaactggcccataaatgtatgaaaggtgactaattttctttgcaattaaattagatggggaaaatatgttttttgtgaatctcagggtcagtgtgtatagaaatacaagcatttcttgtgatgatggtgggattgtaacttaatatattctttttagaagacagcttggcaatatttatgaaaattttaaattcagtttcacagctaagactttattcaatgggtaaactcacaaagatgttcaggcacaaggatgcctgcagtgttatttgtattaattgtagtaaaaactggaaatgacccacaagactatcaatagagttaaatgggtttttagacataacataatgcaatactatgtgtcaaataagaatgatcattatctctagatcatgatctgtataagtccatacaaaagggccccaagatacactattaaattacaaagagcttggtgcagaatagtatttgtaatactctcttggaggatatgcaagaaactattaacactttactcccgacagtcatgaccaagcaattagagttgccccaggtaacatctatttgctatcctgctctgtcacataacatttactgtaagtagagctctctctgagaaatgtgctggtccaagctctttgaatatttgtatacagttaaaatcacgaagaactgaagatcactgcaattttcaaaggaatgaggactttaaaaggacagcagcagcaagggaaaggtagggtgaccaacttgtcctaatttgtccaagacttccccagttttagcactgaatgccccacatcccaggaaatccctcagtgccaggcaaactggaacagctgatcaccctcacctgccttggggctgctgcagaggcctaagcatgaaccgtagacacaagagaaactgagaaactttctttctgcccccatcctggcttccctgtacctctgcccagatgccaaagagtcctcctcactttcccacagccacaactcccgacttcccttgcacctctgtcctttggtacaaagatttctacgtttgcgttagtgatgtgacctcttggattaggatttccaaaactagaaatgtttttggagtttatgtagggttttacaggagaaaagaagctattgtgaaagaactgtgagggaaggaattggatataggaacaaaagttattttgggggctagaaatcataaatctaaatgggttttcaaggcaaagaaaaacttcatggtatagataggaaaggatacagtattattcattagaaaaatggaaatggtatctatgaaattaatttagatttaaacaagaatattttaagagggaaagtttcttttttttttttttttcttgagatggagtctcgctctgtcgcccaggctggagtgcagtggcgagatctcagctcgctgcaagctccgcctcccgggttcacgccattctcctgcctcagcctccctagtagctgggactacaggcgcccgccaccacgcgtggctaattttttgtatttttagtagagacagggtttcaccgtattaaccaggatggtctggatctcctgacttcttgatctgcctgcctcggcctcccaaagtgctgggattacaggcgtaagccaccacgcccagccttaagggggaaactttcaagagagaaaaacgccaaccctgagggaatatgggattaaaaaatgtatcagtaatttatatgcttctgacactttctatgtgactcagaatactctgctgggaatagctaatggcagaaaatttcaattattcccagttgcaggtgctgtgttgtgaaaggcacaatagcccctagcaaccctaacgaggttaaaggaacagtccctgaggaatctcactgttagtatccatggcaagagaaaagctaaacactggggatacatattacttcacttttgtccctgaaattgggcaaagtttcagatttgagaatggcatcagaagtatagctgtttagtgcatgtgtttctcatcatagtattgatattcatttcacatatattcccacagtaaccatttactgaaggaaagccaaagccattttagcttgattacattttctttttttggtttgttttttttagacggaatctcgctgtgttgcccaggctggagtgcagtggcacgagctcagctcactgcaacctctgcctcctgggctcaagtgattctcctgcctcagcctcctgagtagctgggactacaggtgcatgccaccacacctggctatttttgtattttgagtagagatggggtttcaccatattagtcaggctagtctcgaactcctgaccttgtgatccacccgcctcccaagattacattgtctaagacttcctacagaaagacaacttcatttgatattattcacaagccatctagtctcttgccttcaacatttttggccatgtagtgggtgggtgtgctcctttttgcactgatagatcagcagccatgccacttttctaaaaccatatttattttgccccctgtatcatccattcagtcatttaaccaatatttgctaggaaatgagtgagccattttagcttgattacattttctggggtttcatagatgactaagatgtagcgtccactctcaggagttaaggatacattaaggaagacagataaaaccaactaatattatgacattgtaggatgaaagaggtgtgtgaaagatttatgaaagtatagaggaggaatgcttaaattcgggagaaattcaggaatagctatctcaaggggcaagtaggtaccctgcagtttctataaaaggtgaaggtagggaagacttacagggagactgaacaatatacgcaaaagttacagaggtgtgggagagcttggcttgatcaggaaactatacactgcaggctagaatcaatgagtgctttggaaggaaggggatgcacatgggagaaaggaacctagaaaggtaagtcgcagacaatgagggaaaggcaaaagacaggacatttacatttactgagcttttattttgtgccaggctttttatgtttggtatctcacacaattactccagtaacttcctgacaatgtttgttactccattatgcagatgaggaaacagaagatggggaaggttatacctgggctgacccattttttgaggccaggtgtatctaataccaaagaccctggtcattttaccgcagaacattgtttctagaaggaagtttaaactttaccctgaaggcattgcagactctgatggacatcaacaggagagaggtatgatcataattggattttattttgagacagggtctcactgtcgcctaggctggagtgcagtggagcaatcacggctcactgcagtctcaacctcccaggctctgcctcccaagtagctgggactactggaacctactgccatgccaatttttttattttttttatttttatttttggtagagatggggttttgccatgttgtccaggctggtctcaaactcctgggctcaagcaatctgcccatctcagcctcccaaaatactaggattacaggtgtgagctattgcacctggacttaactccattttagaaaaaaactaaaaaactaaaaaaactaaaaaactgtcgtgtggaggaggaggaactgagaaactgggggcttttcctaggatgacagagaaacattttcctgcaacaaacttcaatgtctaccatcacatacatacaagtctaagtttcataggccttgatgttgtcattcttgcatttatgcctagaaacatgtaagtctgagatgtaaattgcagaactaaagatgatggattccagaaactctgatccacctaagagaggagtaggattgtggaaggcacataagggtaaaatagtatcacatttctaaacttgaaaaactcaattcaaatatgtgcagattcagtcccatatgaacagccatgttggctagaggacatcatacttctcaagggcaacagagatgctgggagcagattaagtagttataacttgcacctgtgtaattactatagcgagtcacacttctgtcaaatgatcctattgctttaaaagtttgagatgatgcctggtctaagagctttctttagctgcatgtctcaatgtggctataaatttcagtcaagtcatgtcctgcacattgggtctaattaaagaacacaagagtgagaagggcagggtatacactcagggatggtggagttagtttatttcttggatggaaaatttaacggtcattataatgcctctttgggttggaaatacagattcttatgtacacattcattttgcacaaatgaaaatggtaaaccaaaatcagagagtgttgaagttcttaaactaaagactaccttatagtgagctctagtaaagaaggttagaaacaatttttaagaaaatttaataacaatatttcagagaaaaatttgttactgaatattttccagaaatagtaacaagacatctgtattcaagtagatacaagtgattgtaccagagggtcaatattttgagatggcaagcacacattcttatcataaagatatggtacaggaactagaagagatgtaatattccttgacgtgattctgtcataaaaggttaacaatgttacatcttagggccaaggagacaatcctttgaaggttgcaaaggactggctagagtcaggaatcatcagcgtattcctttaaagataaaaattatatatatgcatacaagtgctacttttaaaatcaggaatgatcttctatttttaggggccaaagagaagagttaaaaactataaatggatatttgacttatgtggcagaagaaaagttcagaggtttcaggatctgcaggtgagaagaaaatgtaaactaaatggcaatctgttcagtgattttaaaattcctaacaaaatgcatttcctacaaatgttgctacctgaaaagtaacaattagacatccatttatttgtacttacataataaaaatatttcagagtaatgtataccactgtctaagtctttctgttctttatctgtagccaaacctacttgcccaaattagttgtactaagagttttcaggctgtttacaactgaaaccatcttacaaagtattttaggccacatttgttttgttgatgaggccaagagaagtgaaatagtttttccaggggcatgcagtctgttattaacaaagttaagactatggacaatttcaggatcttgttccttggtgttttggaggttctgaggaagttggtgaaaggcttctcctggaaagtaaatgtggttaagagccaaccaggtgaggctccaggcctactgcctcacttcacctaaagcagatgggctgtgttacagagacttatagaccgggctttttttgaagactatttatttgaaacatctcttctgtcaaatgaatttttaaatgctaaatgaaattttttaaattttaaatgagtggcccacgctaatgtattaggcatgtgaaagggacgatgttgtggacatcggcaggcagcctacatgttcctgaaggtcagacccgtaacccattcatcttggaattttcctcacttggtgccttttaaaaggggatttaaaggcaatagggtctggaggttcttgcagttatagcttcaggggctcccttctgatcttgcacagttttctaattattcccttgttttcttccactgacccatgggatgtggttaacttgtgtcttctaaggccagctgtgactttttccttacccacgttacttccaagttgggaacacaatcttgcaacctggccccaccctgttgtctctgcacaagcctgaaaactcaggtaaatgaatgaatgaatgaatattaggctgataataactacagggaaaaagataagaggtaagaaaaataacagtgatgaaattagcaggcaatagagcccctaaatatcaaaggaaggtaaatgagttcattctagcattccactagccctcttaggctttgtcatgattgctttctcttttttctgtttacgttaatattttgtttctgaaatgcatctcatcctttcctccctatagagtctcctaaattgctttcttttctccccaaccttcattttttcctccttcactttcccactttcaattctaatttccaattagatcacttaggtttacaataatccccaacactacgtattattcccatctcaaagcaaactttagattgtaaccttcaaattcaaagtcccttatacagttttattctggaaaagttgacttcaagcaattattgattggcttgacttcttgctaaattttgcctaaaggcgagcctttttgaaatcacacaaagggtggaaaccacacaaaagtagtggttctcaaactaggtgggaattcataatggttataaagaatgaaatgggctggtcacagtggctcatgcctgtaatcccagcactttgggaggcccaggcgggcggatcatgaggttaggagatcgagtgaaaccccatctctactaaaaatacaacaaattagccaggcgtggtggcacacgcctgtagtcccagctactcgggaggctgaggcaggagaatcgcttgaaagcaggaggcagaggtttcagtgagccgagatcgtgccactgcactccagcctgggtgacagagcgagactccatctcaaaaaaagaaatgtaagtaatggattatttgggagttaggtaaggagcactgaaaaatatgttctaaaatttatattcatgaaaaataactgtatttttatttttaaaaaataacatttattaatagagattctatagaggaatgaagttactttttatttcctttcttttcctttactgtttccttctttccttccttccttccttcccttacttcctgcctccatcccttcctccttcccttcctccctccttccctccctcccttcctccttccctccctcttttccttctttcttccttccctccctcccttctcatcttggaatgagaatacacaaatcctcagttaactctacacttttattcaaacacaaacttcagttgccttgactagttttacagtaagaatttaattttgaagaaaacaaaaattaaatgtcactatcaataaatcaacctaaagatcaagtagatgtatagcatgggcagatatatcaatttaatatagggattaagaggttgtggagtcagcctgacccagtctggacttcagctgcaccgcttactgtgcatgtccttgagcgagttaactaaaatataccacacatccatctgcaagcatagcagtgaaggttaaataataatatgtacatgaaaaacttggactgtgcatgggacatagtaagtactcaataaatattataattaatacagttttgcaaaacatagtatctcatactgctcacatcactgcaaagtgataaagcaaaggacatcccaatatcctacctaagaaaattagtgttcaggcaatatttaattcatgtgcttctagtgctatttataattatctcattcaaatgtcattttgtaacaagtatttgatgtcccagctgacttgattctagacctagaacttggaaccaataataaattggtgggctttgaacttggaaaagcttgtgatagagtctaaagttttaattccacagggttgatgttggttcactgcttgtcacgatgtgcaattgaagctggctatcaaagcagaataaggcaaaggtactttaactccttcacaatcacatgttttcactttaatccaattatagctgctagtcacatgctttaaagatcacagatccaaataaagaaaccatcgggggtttctctatggcttataaaggagcaacatcttttatgactttaattagtctaattttctattgttaaagagaaaagaattatctgtccttaactaaggcagtcagttgtgcacaaagccaaacgtgctgtgggtcaggagatgtgagttctgacctctgaccaaccatgacctctctgagtactgagactagtcactggctgtctctggtttcactttccttgtttctaaaatcaatccttgcactgatgatcagtgagatcctttctagccatcatagcctattatttcatacaaagtgatttttccagaataactaaaaagctgtaaatggtatgttcagagatgacaaaatgagacagtaaataaagggtaaacgtatgtctccagaaagcaaaaataaataaataatactcaatgagaaaaaagatgagtggtgttttgaatattaacctctatgatatttcagttattaaaattagcttcatagttaattggctgatataacaggactttgtgtttcttaagcaagtatttgttaaacactgatgaagtctgtagtttatatctaagccccatgaagtttacaacatttgagttcaacaaagtttatcttgcaggagcttgcaatcaagtagatgagtaaaaagtacggatttaatatacattgcttaaaaggttacatataaatcacatcaagccaaaatatcagcctagttaagttgcttgacccagggttataactcgaatacacaggtctctggatttcccttttagagaccgtattccctttaatagggtttaatgggggggggggggggaaccatccagaagctgattgttgttattgttttataaatgtctttgttcttttaaaggtatgtttaatatgctgtttttattacagactatgtatccatgaaaagtaagtttgaaaatgcagaacatagattttttttctcaaagaaaataaagggtgaatttaatggaatgatcattttcaactggaaaggtgtatttgttgaatgctttttgtgagcactcaataatttagcttttggagcattctccatacagtctaatttaatatttgtaatgatccatagtgttatcactatcccacatgacagtaatggaaatgaggttcctggaggtccagtgatttttctgaatttaccaagtaaatatttgggaaagtgaaattaaacccaggctggcaggctggaaaatgtgtgctcttccgaatctttcatcttcttctggttcttggtgcttctctggaattttgcatacagagagaaggggacaggttcttttcacttttgatgtacagaggttatgagaaaataatcttaagaaatttactgaacagctcggttactaaaaatgtacatctatctttccgcatgatttttaagaagtgagattcccaatgaatggatttaaaatgcaattttacattcacctagaatgaatgtgcagatctttcctaaagatataagaaatcgactgaagtaagcaagaaaaacactattccggaattgcaaagggtatccctgaagagtatgtgtgaatgccataaaagttatactatatctaatattatcgagccctaattgaaagccgctgatttcacctacataattccatgtctgcgaaatcatgtggtgtttctagtgaacataaacacatttacagttaaggaaaacttaaaatatgtatccaaagataagttcaataggtttaaaaacccaaaatctggctgggcgcagtggctcatgcctgtaatcccagcactttgtgaggctgaggtgggtggatcacccgagttcaggagtttgaaaccagcctggccaacatggtgaaaccctgtccctactaaaaatacaaaaattagctgggcgtgatgacatacgcctgtagtcccagctactcgggaggctaaggcaggagaatcgcttgaacctgggaggtggaggttgcagtgagctgagatcctgccactgcactccagcctgggtgacagagcaagattccgtctccaataaataaatagatacatatatacatacacacccaatatcttgttcttattctttttaaactaaaaaaaaatatacacataactgtaggaagctttccttttcctttctgatagacacctttgaaatattaacttggtcagattcaacccttcctatgtttttaagagtgctagccaatatgtattttgcttgtatatgcataagatttgtttacataatacacaagaagctgttaataatcgatcctttctagggcacgttttgaattttgaagcatacgaatcaattatcttttaaaatattttcaattaaaaaaagttctagggtggtactacaggcaaggtatgatggaagtgccacattctcaaagccactgaagagagccagttgaaagttagcaaatgagttagttgtttcatcaagaaatggaagtggtctgatttttttttttttccaaatcaaataatgcagtacagtgcaaattcttgaaagatacttttattttcaaattgtacttggaagttcttcttattctgattctgttgagcagtgcaataggattacattggtagtataattgaataaggctctgtacagaaaaactataaaaaacaattgcctattgctttatttcctgagaaaaaaaattaccttttgataaaataagtagaaatgctgaaaagaatgtattcaagttagaagtatactccccactgaacacctctttcacatttctggcccatatagcagggatccccaacctccaagccacagactgcttccggtccatggcctgttaggaacctggtggcacagcaggaagtgagcagcaggcaagcgagcattaccacctgagctttatctcctgtcagatcagtgggactgtgaatcctattgtgaactgtgcatgcgaggcatctaggttgtgcactccttatgagaatctaatgcctgatgatctgaggtggtttcatcccaaaaccaacccctctccccaccatccatggaaaaattgtcttccatgaagccagtccctggtgccaaaaaggttggggaccactgctgtatagctacaacactcaagaatacatggcagttccatttaaattttaaaaattgaatgtctttggtttaaaatattgaatggttttaaatattccttataatgcaagaccacatcttaagctacaatggagggtaaaggacaaaggctatatttgaaaagtagaaaggaaatacaagagttttcagttaaattggaagattttttttaaaaaaaacctcaaacattttctaaaccctcaaattattcctaagatgcattcaactttgaatacattgataaaattcattgcttgacaaagttgcctatatttttcattgaattgggcagtggtgtgattgaattggccaaatcagaacctagagtgagcattctataaactcacctttactttgatccttgaagatcacaagttttgatactgttgaaatctctactctttcaacactttaattaaatggcatttagaatttcatatacttctgttgttgtttccacaatcttaaactggatttagaaatacttataatgtaaatgcaagagctttaacttagtaactgtatttcctattttttgttgtttttcttttgccagaatttctgtttgtctacaataaagtccagcgaaatacagtatttggttaggttacttgttaacataaaattttatcatttgtagagtttttacttaaccttcctattctctagtctctataatctttcaatgaagataaccagttacgaatatctcctataccatattaggcctgccagaatgtgatttcttggtataaagtgattttcaaatgttttcctaactcagtagccacttccatcatttatatctgagttatttcctctttttcttaatagagaaatgaattgatattcaagccaataattgatattcaagtgacatagttatgtcactaatgaaggtaacccatcctcagctaggaaaaaaaaaatatgtattttccaaaactgctgacttttactttgttgtcagtgaccttggagtcctggttctatactgtataggctgtgtgaccttatttcagttgagggtagaagagaaaaattatattgcaaaagtgggaaagaaacacacttataagattttcagtggaacttgagaggacttttcatttttctttttactataactcctcaaacagtatctaaaccttcaagttgttgtttctctccttctctaagcttcagtgctctcatttgtttcatggagataataaaaaacatctgtgcctcatctcatttatagcatggagacaatgacaatagatccacacctcaaacagtgtggagagggtgaaatgatgatgtagagagaaagcgtatcccagcacctgcatggtaaccactcagcacaagttatttgttattgttttaattggttacgaattgtattttacatataacctgtcctgtctggaataaatccattaccaatgaaaacttttaaataggaactccgtagatgataggttattcaataaagatctactggaaataaaactgttttccaaaataaaatatatagcggtgtgtgtgtgtgtgtgtgtgtgtgtgtgtgtgtgtgtatctgtgtgtgtacatacacattttaaaaaattgattctgttctcaatagcagaaaaaagtctttccactaccttaaacccacatttgactcaaatacactaacgatatgtaaccactgttcaaaggaaaagctgacggacattaggctgcggaatcctgcaatgcttgtgctcagcttgggcctgggtgtcaggataggaataggagatgccagacctgtttggtagtagtggtagtagtcattgcctaacctaggcaatcatcagctcatgggatttggtgctttaagcaaaggtgttaattattcccctcctcccttttagtaccattttctcttaaactaacacccatctttgggcttaactaagcagaaaagcaaacagggaagaaccaggtggttaaggaccagtgtcttaaagtaaatactctgtatttgagtccaaaatgaatttcaaactcaggttagatgtttcttcttaatcacttaggagccagtaagactctctaagccttccttcctacgctctttcactaaaggaccaggttctttcaggtgctatcctatttggaatttaatttgccctaacatttctccaagagccattacagcacaccacattgctgtatcccatttaactcccaaaccgcagagaagctggctgcagcatcaaacactattaaaaataccacaagggaaccttagagtgggatttcaggcacaagttacagcctaaggacaaacagcggttgtaaagagcttgaatgatactggaatggagatttaggagaattttcagagtctgaaaaaacagtccttaagattttagtgttggttcctagggctggttctccgtggttatatgggttagttaaaacattagagtaactttgcctttctccctctctcctcgagttttttttttttttttttttttttcggtcaacagatttggtaccaagagtgactacaagtgagaatggcttaacaaatatttccaagaagaggttcctatcactaggccttgcaaaggaacaacagactcattagatttttttttaacctgaatatctttattgtgccatctaagcacttatttgaaagtcttcaggtgtaatcctgattcagggtgtttaaaatgcaaatgcagaaattagcccagccatggctacacaagaggccccaggcatttcaaatttgaatgaatattttggaaatggagcagaaacttaatggattagtcattatttagagtcctgtcatgtgggaggtccaaattcagagccttagagcggggaggaatatgttatagtgtggtggtggcagcctcaaaataggtagtagtggtggtgaaggtggaggaggaatatgaggataaggatggtttttctgggtggaagaacaagaggaagagaagccagtacttgcctttcaagctctgcagtagtatcactgcaaactgagcacaacaatggaagaaatggcttctggcatccacttgctcattttctcttattggccaacatacttctggaatcttctcaaaagatccattctgacagactttttattttcccataaaattccaggagcatgtgtagactggacttctgggcttccattcttatagaatgtttccttcatataaaatgcttcagtttggaattttacattcagtacagattatttcattaatacagtgcatatctcccctgtcctggaccctagattataaggagtaagaatggggataatgcttctttttggtcatcaatgtatctcaagagctttgattagggcctggcacatggaagactctcaaaaaagtattgtttaaaaaaatgtctgaattgttaaatggacctggtctgaatatctaatccaaaggcaggcaattcatgggtttaccagcagccaataatctataatatttaaccacagtggaaagttacctcattgtatttgtaaatttgtaggctcaagttgcaattataaatgggaaattgcaactaaggtaattggtgtcaagagaaaaaaaaatttttaaatctactgatggcctaaaattgggcctagagaagctatggcaagccatgtacaaactcaggcaatgagaaagcagacactatggagagtagagaactatctctagaaaacaaaaaccagaccagatatataaataaacaaagggcagagtcctgagaaagacaccatatttactacaagcaaaagaagaagtttcaggtgcctagaactgtgatggttcccaaaacttctaaaccctagtccacctgtgtccatgtgagaatgacatttattttgatctagttatttctggtaaccgagctgatccagtgaggatattgtcatatggtgatgagggacgtttgtgaattactatgtaaagaaaagatgcttactctgtgccagtagcttgggaatctggaatcccttcctgtaagcctcagagtgtttccaggaaaagtcaccaaatagctttgattcaaggaaatgaatctcttctgtcctgtactggctgcttgaaaacatagtcacctgagtaatatgagtccaaagtactacattacatctcagtgtttcttgcaattgactaacatgtagaaattgtgcttggctgggatctcacagttatctggttggtttctgtctgctgcatggagctcacttcctggtagtgaccatagaaggaggcattatctttttccagtcactaaaaactatatgaacatcaacaataacctaatttgtgagctctctggcaggaatgaaattcctctttataatcactgatggtactccctgtgtatggcagcagagtgacacacgctgtcctagtggaacataccctcactttgccttgtgtttaaagctgggcaccacttctaccttagggagagagatggtgcgaaagcagaagtgaggaatcacagatgggacagagttggactgggtgatgctgcagtgaggaatgagggagcatgatgaaggaagaatgatataattttagggagctgggaatgaatagggtgaagagggagagaaaagaggagatttagacaaagaatgggaaacaagacaaataagggaaggagtgagggaagagactggaaaaagaagaggcagatataaggaaaggaaaaaggcaagagaatagagtagagaacatgtgaaaaggagaagatcggagaaaacaaatgaactgagataaaatttgagggaggcagcagagtgttgactgcagggtgtggaatctgaaatataactgccaagttttgaagcctggctccacagctttccagaataatgaccatgggacatatccctaaattctctgagcctcagtttcttcttctgtaaaatgggaataataattttacctaccttatgtgatcatgcatgcccagtcttagcacagtgtttggcacacagaattgttattattgaggttaaaagagagaaacaaagcaaagaaaataataaaatggaggaagtaggaaagagagatgttcagacagtggaaggatggaaaagaaatgtatttctgctaataattttaaccttagtttttccacattataatcaagatttctatgcctactatattgtttctacctgctttaataacagctggaaaaacatgttgagtatgaacataccttttttaaaggtatttttgtattaaaccagcctgtaatagtttgcaaaacagatgttcacatttccttgagttgaaattattccctagaaatgagtaagacgaaggatacatgaagctaaaccggtcatccaaaaaacggtttgtttatttgccctacctctttactgtattgactaggtcgtttgatgggattaactaaattgaccggttattttgaaatgtgttaacccaactgtaggctttagggaaaataaagcccctagtgttcttggtggtgtttctttccaagtttctctccacaacacaaaccacttccttttacttgaagtcattttgcttttctcattagtctcacagtccaggggctggtgttgagtgctgaggcagctctcagttcaagaccataaaacaacacaacaaaattagcccaaaacataaaaggaaagcactgtggagttgttcttctcctctcaagaaaaggaaagtggaagttagggcagataaagtatgagaaagagatcagagatctattcttgcataggggtggggaggtagaatgaatgaaaccacagcccaagtcagagggaaagaaaatggaaggagcaaaaacaacaaaaatcccccaccacctctctcgacattcatcacaacaactctctgtgcacctggcatggtgctgcacagttgtcagatcccaggcatgactccctagtgtttccatgaggctgaataaatagtgttctcacagactctccagtagcagcgggtgaaaggccaaccttcattgaccactataaggcttttcttaaatgctactcggacacaccaaaagaaatgttgtccttttcacaaaaacatgtccttgttcaggaccatgtaagttatttaaaataatggtcaatgaaacaaatatagcaatggtatcgcttctcacattttcctcattctgctcagagggctgacagagtggagaagatcatccatcatccacttctttcaagttactcccttctgccaaagggattaagagacacattttcatcccactttctcaaataggagaaaaagttttccatgctggtttctactgttccatgttttgctcttatattgcacccaagaatcatttcaagatgttctgagaagagatgtaaaagagtcagctgatcttccctacttcaggtctattgaacacaggtaagttggcatgacagtgccccagaaccacacactagtactatgtgtggttataacaaaagaattgctatactggtgggcagggtttttttttttgttgttgttgtttttttttaataaagaggcatagaccataatttttagagcaatttcattaggttatgctagaggtaggtttgggagaagagcctgactcggcctgaggaaggggactgggcttgaattttaggtgtcctctaaaatgagataaagtgaaccaggcaattatgagagagaagcgagttttagatggtgagaagagtacaagtaaatgaagacagttgtgaaacatggtgcacgtgggtggaaaaagtttgctgctgaaagagtcagccaggggctgggctggagaggaggtacaatacatatctggataggggctttgggtaccacacgaaagagatctgattttatcatggatgatgggaaggcttgaaaaggttttaagaagagtgacatttgcagattaatttttcaactacataaatttgctggcatcatggaaggccagagctaagaagaggtgcaacagagatcgaccatttaagaaagtagttctctaattttaaaaattatagtaagaaatacattttcatggcaaaatgtctgtgtgtgtttgcatgtctgtgggtgtatcaataattttataaaaccatatttatctttgatattatagatgtggttttatactcttattttttacgcaattctgtatcatatttttaaaataaaatgctaaatgcaactgacagtttcaaaaacactatttcaggtactagtactataattcaggggagagttggtgagtgcttgaactagggaaatattagcaggttagagaagagagcatggatttgatcaatagttataaaataaaataaaaattgtattcatttggggccgagcatggtggctcacacctgtaacctcagcactttggaggccaaggcaggaggatcacttgaggccaagaattcgagaccagcctggccaacatagtgaaacgctgtctctactaaaaatacaaaaattagctgggtgtgatggtgtacacctgtaataccagctacttgggaggctgaggcacaagaattgcttgaacccaggaggtggaggttacagtgagcttaaatcttgccactgcactccatcctgggcaacagagtgagacaactctgtttcaaaaatatatatagacagacagatagatttggtagaaggattcatgatttataagtttcgatcttggctaaaagtgtttcactaactgagataggaagaacagatttgcaaagaaatatgtgagtccagctctggacatattggatttgaagagttggatatcaatggacattgggcttttgtgtgaataaatttggaaattggggaagtgcctactctgagtagagacagagttttgggacccactttcataagatggaaaatacaactatgaggtacatgaaaacatctacagagtacacagagtgagaaaaccaattaatcaaaaagaacattctagaatactcacatttaagaggtaaagtggggaggaagagagaccatgaagaatagtgaaaagaagtattcagagcagcaagaagagtgtggaaacatctggaacaaaatggctcccaacaaaaacatgttgaataaatatttactcagtaaatgaacaaagaaagagtttaagaagaagaagcctctaagaactaagaagacaattaggagttcattggcaaccaagggagggcagctggaacagaggtgttgtgagaaagtcgtactacagtggactgcagactgaatagggatgaggaggtagagcaacttgactgaaaagagaagatcaagaactagctaaaggatcaataaagagttggctgaactttgctgtggtttgctgtgtattgtttttaagattgtgagagacatgaatggggaaagagccagaataaaagtaaagattgaagatgtgagagatagaaaggaaaacagacgaagcaaggacttgtgggagctgggaggagagaggatcaagggcccagatgcaggggttgacttagagcaggagggagaagggaaacgtcatccgctgagaccagaagggaggaagggattatggatgtcagtaagagacctatggataacatctatggcaagaggatgtaggagctgaggaagttcatgccttgacacagactttcttcaaaaagcaacaagttatttgctgaaaggagatgaagagctgctggtttgggaggcttaagagagaggacaggtttggaattagcatgaagaggactgagagaggggcacagcaggaactaactgtcaagtgctctgagagtccgatgaggtgacaggtcttgactttgttggaattccagcttgaagtgatgtgggattatttttcccaggaattcaggtaaggaagtggaaaaggcagactgtaaaactgacagagctggattttcccaaagtgagtaaggaggacaggatggcaagagattcgagagagactgggcaggccagagggagaggttaggagaagactcatttgcttaaaggagattgaaatccctgaactagagacttgccagaaaaaaaaaaaatatatatatatgtgtgtgtgtgtgtgtgtgtgtgtgtgtgtgtgtgtgtgtgtgtcttattctcttttgtggcagacactaaatttgagccaaggagatgtaagtagaagcattatgtgggatttctcagaagccttttctaaaaggagtgggtgtactattccttcttttttcctccttcttgctgctggccacttagttgtgatggctagggctcttgtagtcatctcagaccatgaagacaaagcctataatctagaaatgttaaaaaaattatctgaaagaagctctgggcccttggtgattttagagcagccacagcagccctggactgctcactctgaatttctggaaaaagaaatcaacttctgtcttgattgaagcacaattttaaaaaattgaaataaaaatattttatatatttatggtatacaacatgttttggtatatacagcgaaattttcaggactcatttactaaccatattctagctaaaagagaatatatacacagcaactagagaacgaatagagatttcttggaacagaatgctatctttctaccatgtaatgcctaagcagggcacatactttatagtaagcaaaaagctttgatctttgcaggagattatagactgcttttgatttgggtagagaagaaacaaaagtcaaatcttggatttcttcattaattaaaaaaaaaaaaaggcaaaataaagccacatgtatgttgttttttcccgtaaggtcaagcaaagacttctttatactttttgtgagaaaatgtattgaaaattaatgacattaatacccaggatggtacatttccattgcttcacaatttttttttctttctgaagggttagaatttccaccagtcagcataaaatggttaaaactgaagcctagtaaatcacttgtattgcattgttttcaaagtgactaaacagctgtagttttcaaggtcagccaaatcatctgccagggtcacacgtgtttcacatgtcaagtaacgtatatgggttcaattccatccaggatcctaaggaaaaagacatttgcaaacaagtgatccgaagacatttttctaaacaggtgctgtggttactgggataagagttactattgtaaaccacttgaatttacgactaagtttccaatcatttaaaaagaatattcatttcaaattataatgtccaaaccaagaggaccagctcctgatcataatgacattcaatgaggacagaaagtaatattgtataattgttattattaccataatgacattgttcatgtacaaatgagaagaatgtatattgggtatcaaaataaaaccaaccaaacacataattaggatggaacctagttaaacagttgaagagaggagacttaaagcaacaagacttggctaatacttctccctccaattcttgctccaggaaacattgcatagaaacaaaagacatgactaccatatgccaataactgctttaacaagctggagtaattggtatcatggagccagactgatggaacaaagaaaggatgacctcaggatttaaagagtttagggacagaaaaacattttaaaaatccagtttaattcagaggatagttagagatgtctggctccaactgagagaaggaaagggtattgatttgcgtgagtggctctccattgggctcttctaactcaaaagagataattggccttgaatagtagcttttatattgaatttatattgagttctcttgatgttcttggtatgtgctcttcaaagcccaagaccactccctgatcttgtttatatttgctagtcctaatgatctttcatgtgtcagacgtgctgaatgaagacgattgccttctgatcatttaactcttctctgccagtttcaaggttggcttccatattttagcaagcaaaataataggcatctccaagtcacagtatgcagacaggaatagacaaatacccactttagctaagtatgggctgcagtcaagctggaaaaggtctctcagctctgagtcacttatacaatcgagtccctgaacatgtttctgtccctaatattttgttgctctgggcaaccatcaagtccacatgaagacttctgccaactggagaggatgactagataggagtgccagaattttcttttaactctttgttgaaaactcaaaatagcaaatggtgtcaaggatatcccctaaacatccagattggaaaaagtggaattcacacattgccttggtatcttttattcacttcttagggaaatatgactaaagaagataaaggcaattcatcagaggcatgcatttttttataataataaaatattaggaaaaagttagatgattaggtactatttaatccaatatcatcattttacagaacacaacccaggttaaattactgaccaaaaattacacagagagctaggcagagctgggattatacccctggtcttaaaaccctgaggtcattgctctttcctggactttcagaagcccagtgccagaggcaaagtgaagaaatgttaagaaatcacaagtgatcacctctcttttgtaatagcaaacggttctagttgaaaagggctgctttgctgggatactggaagcaatcctaaagctctggagtagttatcacccattaacactcccaatacagaaagtgtgactatggcacattaaactaaagcatctaaagagtgttcaaggcccaacaaaaataccatgtttgctggaagccttcattgcttattattctaatttggtctttgcctcctctgaattcttacgatactctgtggtacagtcctgagactacttaagattttttgcccaggctggagtgctgtgatcatagctcattgcagcctagacctcttgggctcaagcaaccctcctatctcaactcccccagtagctaggactacaggcatgtgccaccatgcctggctaatttttgtattttttttttgtagagaaaaggtttcatcatgttgcccaggctggtctgaaattcctaggctcaagtgatcctcctgcctcagcctcccaaagtgctgcgattagaggtgtgagccaccacacctagacagtttcttttgcacatgtacaattatattgtgtcaagtccttgggggtaggactatatcttattcatttttgttttcttgaaacccagagcacagaattaaacatattttggttgattttattttctctagaggtacagtgacgacttacttatccagattaattatccaggaatttatactattcaaaatcagtaagtaggtgaaaagaacccagaaaagtcaagtaaacacttgtaggatcttgttcactttatgcatctcatatcctaaaggtctacctcagaaatgaattgccctcaaccttcacttttattttgaattaatttacctttattttatgctcaatgcaatagcttggtaatcaggtttgccaaggaaaaagcagcagcagctcacaaaagatgccaataaagccaagcttagtaacatcatgaactgaccaccagacaatatgggacagcagatgagaaattaaagtgcagccagatttgctgctcgttactgtaggggaaaaaaaagtcctcatagatcattagctcctaagtgcatttgtgaatgacagggaagtacaaaagcagatgttcatgaggaaccagagccagcaaaaatgatttaattacattcagtgtacacctttaagaggttaagaataagcataacacctttcagagattttcatgaatattcaatatacaggacattttctcttaaatgaaatgtaggaaatctaaggatggagataaactagccttaaattcagccttagaatccaggtcttaacctatgtttatcctacatataatacgaaggattataaattttcacacattatcagaagcattttacacctactcagtaaaatcatatgattagcagttatgaaatcctatacatttatcctccttatattttttgtaactatctcttcctttttattctggctatctagctatctagtgtacaacctttattacatcttatgcttgaatatcgctgttgtctttgagttggtttcaaaacctcggatttttttttccttcattagctgcattaaaaaaaagaaatttccaggtgattattattatcttctgtagaaacaggatctcactgcgctgcccaggctagtctggaactcttggcctcaagtgatcctctggccttgacctgctaaagtgctgggattacaggtgtgaggcaccacgcctgccccccaaggtgattttaaggaacagacaaatttgtgaaccactatccctaagtgcttagcacaccattcatttcactcttaattatatccttcaatggaactaactcccttagtggcaggcgtaatatgcctgtgatttctgagcttagatgctctttaaaaatagttgtttttggccgggtgtggtggctcacgcctgtaatcccagcactttgggaggccgagatgggtggatcatgaggtcaggagttcaagaccagcctgaccaacatggtgaaaccctgtctctactaaaaatgcaaaaattagccaggcatggtgacgtgtgcctgtaatcccagctactcaggaggctgaggcaggagaatcacttgaatccaggaggtggaggttgcagtgagccgaattgcgccattgcactccagcctgggcaacagagagagactccgtcccacctcccacccccgccaacaaaaaagttttttcatattcattgtgttagcccaaaatatctgagacaggtctcaatcagtttagaaagtgtattttgccaaagttaaggatgcacgtgtgacactgcctcaggtggtcctgaagacatgtgcccaaggtggtcaggctacagcttgtttttgtacattttaggaagaaataatacatcaatcaatacatgtaagatttacactggttctatctggaaagctggaaagcgggaaaactcaaagttgggggagggcttcgaggtcacaggtagatttcaacatattctgattagcaattggttgaaagagttattatcagtagaaaggaatgtctgggttaagataaaagttgtggagaccaaaggtttattaggcagatgaagcctccaggtagcaggcttccaagaaaagagatcctaaatgtttcttatcagacttaaggtctgtggtgatgttaatactggaggggtaaaataaggcatgtctgacttcctttgcggcctaaatcagtctttcaggttaaattttaaagtgccctggccaaggaggaagtccattcaggtgagggtgcaggcgtgcttcaaattttatttttagtttacaactgttagcgaaaagtacgtcctctcaatttccgttttccccctgtatttacttaagaactattttccagttccttctatatcttgctttgcatctccagcaaagagatactaaagttttctcttggtcttcttttcagaggtgcggtttgatgattacgcacaaagagacaaagataatgagtgggggtagacctgctagcttaactttttcttttagagaagcacctaaggggatctgtcacatggatgaatctacccttctttgaaggtctgatttgaaagcagattggactacattctgcacaaaggcattttaaacatgcaggtgtgaatgccccaaataacaatactttgaacttttacagaacctttcatccagtgataccaaaacaattcagtttattaaaggcctaggaagctggggacaaaacatccaattgatctatatatggaaatttattgcattaacttggttggtgattcctttcaagtctcccaacgctggggcatataagcagagaaaactgtacggtttctgcaagctacctctccaaattgtaatattttccatttccaactcctcaagaagagctaatcctcttcttttcacatttatgcttaattagagagttaccagttcacagacagttatttatgttcagaacctaataaattcttgtttctgccttaatttgaccaaggattgccttctatgtcatgttctaaagaagcccattgaacaaataaataaaaacagacttcacctgtagtgagggagaactattatctaatcaatttttcattttaaaaattaaatacttcaaaattggctgggtgtgatggcccacacctgtaatcccagcactttgggaggccaaggcaggagaatcacttgagcccaggagtgcaagactagcctgggcaacatcgtgagatcctgtctctaaaaaaaaaaaaaaaaattaaaaattagccaggtatggtggtgcagtgctatgtgcctgtagtcccaggtagacaggaggatgaggtgggaggattgcttgagcccaggaggtcgaggctgcagtgagctgtgattgtgccaccgcaatctagcctgagcaaaaagtgagaccctgcatcaaaaaaaaaaaaaattgtaattaaatcttatttttaatctgagagcatagatttaagttgccctgaatatacactctcacttatctaattgattttttttttttcttcgaggcagagtcttgctctgtcacccaggttggagtacagtggcatgatctcacctctgcctcccgggttcaagccattttcgtgcctcagcttcccaagtagctgggattacaggcatgtgccaccatgcctccatgcctggctacttttttttttttttttcagtagagacgggggtttcaccatgttgcccaggctgatcttgaactcctggcctcaatcgatccgcctgcctcggccacccaaagtgctgtgggattacaggtgtgagccaccgtgcctggccaatcgaattgatttttaaatgaacaatctttttttttttttttttgagacagtttcactttttgcctaggctgaagtgcaatggcgcgatctcagctcaccacaacctctgcctcccaggttcaagcgattctcctgcctcagtctcccgagtagccgggattacaggcatgtgccaccacgcctggctaattttgtatttttaatagagacggggtttctccatgttggccaggctggtctcgaactcctgacctcaggtgatccgcccctccttggcctcccaaaatgctggataacaggcgtgagccaccgctcctggtccttaaatgaacaatctatcgtacaaatctgttggatacctctactttttaccatatatctttcaaaaaacttacaaatttaatcttttcctcttttccaccttctgacttccttattatatacattgcagtgaactcaggacagctaagattcagagtggcaactggggtatattcctattttcccatattttaaatctgctgtaaaggaaatagttgttatgagcaaaatgtgtctgaggaatgtttatcagactatcgtttttatttggcattgtcccagcatattagtttttaatttttttgccccatttcaatggtgactttgatgttttgttttgaccagctgctgagctttttgtggctgtccatttacatcactttaaaaaatggtacataaatgaaatttgaacaaaatgaacagtactttaacattgtttcaaaatcaaatatcttcctaaggaatctgatttgtggcagatggagaacaaaaccttccagagggagggctgttaaatgagtcttaattgcttgcacatgaaaatattgtgactaagattgtgtgcacaattaggaatttaaacatgtagaaaagaactggccatagaaacaggcagacatttttgcagtcagagctagtttcttgtgaacacagacaataaagacaagtcagtaaaggaaaataatttcaagagaaattcagttgttttctttacttcattgttgcttacattgagcttccaattctaaagatgattcatttgccttggaaactcactgatggaagtatcacagtacagtcaagaaaaaaatgtttattcaagaactagtatttcttttttagttcctactatgcgtcagatgctaggtttcgtgcttaattcacttcatttaattcttacttaatgctctgagataggtttgctattattcccgtcttctaatgagaaatcaaggctcagagaataactttcccaaagtcaaatagctaacaaatagtgcagccaggattctctgtattgatttaatgaatccaccctctgacaatgcctcactgctcccctgggaaaaagcacatatcttttttttaaaaaaatgatttaataaacttattctaagagcgcctatactttgttctgagtcaataatgccttccttctgttggatggcatgatgtaggttgctaggctggacttgttaaacgttgggtaaggaaggcatgattgcacccaggcgaagtgaatggctacgcagagggcacagataatctgaataggggttgggctgagatgacagatttagagacagaggccaggacttcctacaggggccacacgtcacggcgtcttgtatagaaccaagcataaaagaggcatcaataaatgtgtgtggatcaaatgatgagatggtcaaattatttttgtgccttcagaggaactgagttctcaggatacattaatgacaggtaccatctggatctctaaaaaaaatgagtatcataaaaagaaattcagtgagaaataaattaataaaataaatagtgcattgaaaccaatcctactagcatttatttcccctatctaagagcaccctaatttctttcaggaatatactttgtatccctattagataatcttaataatagttaaccagcaatgatcaagtgcttactgtgagccatgcattttgcttcatttttcataaatatctttttttttcctaagacagagtcttcctctgttatccaggctggagtgcagtggcacgatctcagcttactgcaacctctgcctcccaggttcaagtgattctcctacctcagcctcccaaggagctgggattacaggtgtgcaacaccatgtctggctaatttttttgtgtttttagtagagacagggtttcaccatgttggccaggctggtctcaaactcctgacctcaggtgatctgcccgcctcagcctcccaaaatgctggaattacaggcgtgagcaaccatgcccagcctttcataaatatctcctcaaataattttcatgaactccctatgagataaatattattattgtgcttacttcaaaagtgaggaatttcaggctctggaaggttaaatgaattgtttgagcacaagcatctgtaagtcgtagtgctagaatatgaacccacaaaatctggtcccatcattcagctcttactaccacattttataacatagtttggtagaactgaagccacctgcctgttctcttttagccaaggcccaggacgcaaacaagacaaattagatcccttcactgctgtttgactcttgaaataatgacaaagaaactaagaacagttgtggggatctcactcgactactcctgccatgagactttccccttgatttgtagccttctagcactgtaaagatgcactgattccttcaaacctcgtcctccagcacccccaccaccacctgtcgccccactaattctcagggaattcagaattcttcctatattcttccactaagaattttgcattaatgagcagagttggtttttttgtattgcaagcaaaggatcattgctgagacaccattttctaaggggaggtgataagccagccaaggggagaattgtatggaatccccaaagaacaagatgcagacaacactgtttagtgtgccacaataatttaatagactcactgagaaataatagcatgacaaaaggccaggttaatttcctctgctgccctttctgtggaaatgatgaaggttcttgggctcctctctgatccactggtcttagatacattggccttctcctttatttccagtaccctcaacagtttccagtaaagagaaacagcaagggagggtctgtagaaagacagactgtcttgaggttggctgaggggtaaaagaaatttcccagaaattgctccttttccttcacaaactgcctagaattcagattttgtctccttcaaagttgcatctgggaaaatgtgtttatatgcttattccacacattgccatcattgtaatgattttagggctccctgtcttggaattgccttaaaagtccatgtgatacttcttaaaaaactctttaaaatcccttgagaatggtttcatttctggagttagccccatctaagctaatttgacattctgtctggtgaatagggttggtaatcatattggaaataatatttttggtcataagtgaagtgttactataaaccagtgagattgcttattgctttttggtatgtgtgtgtcttatatggtctgtaaatggtctctaaagccacttccaaaatgctttcagcaatggcatcagggctcaaataattgcacagtttccagagatggctgttttgaggatcaacagtaattgaataatataataatatttattggtagtttataatacttttcaacatattaagcactttccacatgcttttaaataagacctgacatttactatgtcccagacaccgtgctaatttttttacacagattatctcatgtaattcctcaaaattaggaaggtataattattacccaccacattttaacagaaaagatctaacacatcggcgtgacttttctaaggtcacacgtaaagtgggtgagcaggacagccagccacgaaaccccaattttctgacccctgagtcttgttcctcctccttcacatagattttgacttgtatgtcaaaacacaaaaacaaaacctaccaatgtttgagatttttttctatgggaggataaaacctaggtctgtctctgtagaagcaatattagtcaaataacagtcagtccactgtcagtgacttcagaggtatcttacttgtcattcaactctgaggtctcggtttcacgaccagttcttttctattttccttttggctattttgaaacatgtcttcttttaccaatctcagccctccactttctcatgctgtgaagtattccctaaatttctgaattattttcccaaaccattttcagtctctaagctaacactgtaggcagcttcttagctctttagaaaaacaatctcacctgcatctgctccattcttcctctctcccttcctttctctcttctttattttacttattcatttatccattcacttataagccctctgttttctattaacttaatgctttttgtcattcaacagaacacattttagctttttaagttccacaaacctctagagtaatggtcctgaagcttactggaggtattttattcatccttgggtccttggagcctaagcatagcctttcacatactagggactaaatgagtaaaagcaaagccaggaagaggcagaaatcaagttctctatgtggacagttctgtgttcaatatgcaaacatcagaaacatatccagaaaagaatgtcataaacacccatctgttttgtgtggcatatagaatacagtcaattagaaatacttccacaggaccaacagtgctgaaaaggaaccacaaaaaaacaaaacaaaacaaaacaaaaatacagaaggaagacggcacactagaaagcactggatatttaagcatcagaaatatctcaaggaagtgcattcaggacatggtgagctaggaaacttttgcctagcaatggtagctaagagatgataatggcatgaagagacttcacccaaagagaagattaatattcccagtagttggggcctgccctttcaggccttcgtggtaagtggtcccagaagcaaggtgagtgctaacgctgaagcactgcgttaccctggttcctccgaaacaccccatctgcctgacttctcacacacacctgggcctttccttgtcaatgctctgcccctgggcactctggtgacaacgggcacttcagaagagtcaggaagagaagtgtgggaattgaagaatcctataccccctggcaggaatcctttccttagcttatataactatagagagtttttagggtttcccaaagagtttctgtgcatccacagatcttatccctcctcttgtcctaccctccactcatatacattcaggaatagatggtatagatttgttttctgttctcaaaagaaaaaagaaaaagaaagagagagagagagggagggaaggagagagaaaaaaaagaagagagatgtccctagggaataacttttgaggaccagcacatccagcagcttgtgtatgtgtgtacatgccagtacattttaggagaggacttgacattctccctctgagtcaatccgtactttgtaattttctacctatgtatcttaatcaaattattcaacttgtctagcccagttttgcatctatgaagcaggaatagcaacggtgtctacctctttggatatcataaggtttaaaaagattactcatctagagtgtttggtacatttcaaatgtcagtaaatgttaacttttattaatattagtattaataatatatccaactgatttttaaagcattttttgagagaggctttttgatataacaaaagaaacgacgctgtgagtgcactccctatttatttagagttaaataattcagtgtaacatccaactagtaaaatttgggaaatgagcctcaaaggaattttcaacattttgccccaccacagtcactgtatttctgagtatgcctagaatattttttaaggctgaaatgggtgggaagcactttgtggagaaagggagtgactgaagaatgcagtttgtgtggttcttttattttttttttttcttttattagtttaaggagacttggtactgtgtccaagaagacaaaaagaatgcaattactaaacatttcccaaattccctccctcccacatccacaaaggtagatgtgatacttgattttcttctcagagacgagcaagctgctctacttaaaatcttgtatgtattttgagagataacagatgatgaccctgacgctgatgcccaggatgacgaagtcagcacagataataatatcaccttgtatcttctttcactaatcgtggagcactttgcacatatgatcgtgcttatcctgggctgcactgtttgttagatgagggtgtgggtgtcactatatatactttccagaaagacaggtattttccaacaagctatcatcaactcaatgacaacactgtacacaggcagccctctcacctgctttcttcagtattccattattctcccaaatttggccaatcaagcccattcacctgggagtatttgttaataatttagatcctgagccttatcctagacattcagttctggaaagtctgggaatcagtcattttgtggttgttctcaggaagcccttggggattcctttgatcagagacaggtttgggaagtattgctctttttaaactcagggcagcggggaagggatgctggcaggagtggactttggtgacactgagatcttttattcatgtggtagcttttcttactctgagacagagttttgctctgtagcccaggctagagtgcagtggcatgatcatggttcactgcagcatcaacttcctgggcataaatgatcctcctgaatagctgggattacaggtgtgcaccaccatgtctagctaatttttaaaattttttgtagagatggaggtctcactgtgtttcaggcttgcctcaaactcctggcctcaagccatcttcctcccttgcctcccaaagtgctggaattacaggtgtgagccactgcacccagccctaagggtagtttttctgatcatctgaaggataatacaacatttttgtcataggctcaataatccataaaatgctgccctatgtgagagatattattattttaaaatacagttaatgctggactgtggaaccataatattgaaatattgttagggcgggtctcaccagtgccctttctaggcaaggagaggcaaactaacaactgggacctgagaaataacatgtttgtcactagattcaatgtaaaatggtaaacctatctacctttgctaactactggtcaacaactaaaagtaacttaagttcaattcaatatacataattaaagtgcattaaatgtgtgcctattgcccacatggcactttattatgtattccttaaaatacaaacatttttccatattattaaaattttctcaaaaataaattatttaaaatcattttattatgggaattttttaacccctacctaaatagaattcacacattatttagaatttggattgtttttaaccctttatgcacattcacagtgctgtaatgaacatgtgtatatatactttcactttttttttttttttttgagatgaagtttctctcttgttgcccaggctagagtgcaatggtgccatctcggctcactgtaacctctgcctcctgggttcaagcaattctcctgcctcagcctccagagtagctgggattacaagcacgtgccaccacgcctggctaatttttgtatttttagtagagatggggtttcaccatgttggccaggctggtcttgaactcctgacctcaggtgatccacccgcctcagcctcccaaactgctgggattacaggcgtgagccaccacacctggctcatactttcactttaaaattgttcatcctcagtctctgctctaatcaacccccaagtcccttcaatcctatctctgaagagttgtgaacccattccctcatctccacagccccacttccaccccagttcagagctgcattatcttgatcctgtacaaggcctgtgacagccccctgaagagtatggggctgcccctagtctttcttcttttcaatctctttctacactgcttccaattactgtcattctgaaatgtgtatttgttcctacgattggaaatgctcaatgattttccactgtccataaaataaagtccactgttatttatgtaggcctcaaatattatttccttaatctacctctggagcatcctgttcagttgctcctatacacctttaactcaatttgtcctttactgttcccagtcccctgatatggacaggcattccatgcttccataccttattcttgctggtcttttgttgtgaggtaatcctcaatcctcccctaaccacatggaaagcattatgttcttcaaatttatcagggagcatttcctaggtagagccactggctctctctctctctatatatgaatacatattcatatatattatatattaaatatataatataattatttaatatatattttatatatttattttataataaacatatatatttatatgagaaatatatttattatataataagcatatatatgagaaatacattatataataaatattatatttatttatatgagaattatatttatatattatatatttatataataaatatatattatatatataataaatatatattatatatataataaatatatattatatatataatatatatatattatatatataataaatatatattatatatataataaatatatattatatatataataaatatatattatatatataataaatatataatattatatatatttatataatatatgtatataatatataatacatatataataaatatgtatataatatataataaatatataataaatatgtatataatatataataaatatatatttatacaatttataagaaatatatatttatataagaaatatatataattttataaaatatataatatataatatattatatattatatattttgtatatattatatataatatatatttatataaatatatatatttaaagaggtttcagtccaggctctgtggctcatgcctataatcccagcactttgggaggccaaggtgggcagattgcttgagcctaggagttccagatcagcctgggcaacacggcaaaacgccgcctctacaaaaaatacaaaaaataaaataaaaaattatgcacacgtggtggtgcatgcctgtagtcccagctactcaggaggctgaggtgggaggattgctggagactgggaggcggaggttgcaatgagacaagatcgtaccacttcactccagcctgggcaacagagtgaggccctatttctaaaaattaattaattaattaaaataaaaaatataaaggcttcaatcatggcatttagctagtacttaactatttataattccttctcccttactttgtaaatttcttgaaccagtagtcacattttacctccagagcgtatgcatgccatatataaggtgcatggaaaatactgttgaccaagcagataataataataataatattatagcaataatgataagtaacatttgttgaatacattctgagtaccaagtactatgttaagcactgaattagaatttactgataaagaatacccccaaaacttggagaatttaagtacattgaccaaaattagacaactactaagaggaaagctgggtttttaacatatatgctagctcatcacctttttgctaggctaaatgaacatgagccccatttaattatttcaattaaagttataacaaagcatccaaatcagatattcagacaagagagacacaattaaattatttcccctcataattaggacatagcccttgttttcactattcttaaaacaagtctaacttcaatcaattcctggtcaaaaagccacggtgtcagatctgatctttttatatattaataggtatggctctactcattaaataaaagcataaaaggccaaaacaaattcatttgtaagaaagagaactgacttttactgctctaaaagatcataagtttaactaataaatagtaatactccatgcatttatgcaaatctttcagttcaatgtttttaccggaagattctttttcaatgaggatttttgtaaaagtaaactccttcagcttaaaagatttaggaaatccgacagtcattagatgtattagatgctttatcagttttttattaaagctattaaacacaatgtatcatcagcatttttcgatcacatttcttaaaaagcttaatgaacacatatttctggcaattattaaagtgtggccacaatctttattctattaaaggaaaaaaagaactacagcatgaagctgctgcctgctggtggttgatgaggaagtagggcttctctggcaatggctgggtctcttgtcttccctatacactgacacaacacatgttttacttcagtatctcctgaggacttacatatttctctcatgtagatcccttttgccttctttatatggttcttgctcccatctattagatctctctatatttctttttaaaaaactatatatactacttgcttttatcacacacacacagatttaaaaggcagatctaagtaagtagccagcatccttattgtcaccatgaaatagttgcttagtttctttcattcgataagctcaaagcattaagtgattagcccagataacaaaaaaataattgtcccaattaaatatcattattgtttttcccccttattaattcttagaaactgcttgtgctttagaacaacaaacatataagattaaatttcttctcattgtgttttgacagactagcattatttggatagtttactttttaattttctacgtgccaattgactaaattctatttagaatgcacttactgtttttaatgaagccatgaatcttcagggtaaaaaaatacaaaaaggaatgaagacttagaccaatttacttatttatttattttctggactaaaaccacttctgtgctgttctatgcttgtcactgcatcatgtgtctccccctacaggtaaagagcaggcagctgtactagtttcaccgctcctgtagaagaatttgtattttccaaagtcaaaatccagaagtcttttgctttagggtgctggtctctatgcctctggggtataagcagtagatataatcaaaatagctataactacagagatatgtccagtgagaggttgggatgagaaattttcaagctcatatacaaataatacaatgccacatctattactcaggagttagtattaatacttcatttactttctctaaagcatatacttccacggtgggtataaaggccacccgaatctaatggtttattttactttataaaggtgtaagaaggaccatggactcgaaaaaggaaccacatgtttattcctggcattgtcactaagcagcaccctctctcactaggtctcagttttttcatctttaaaataaagatatttaaatacgttttctttagagttgtgtccttgcatgaaaatcctctaattgaggatgattaaataaacatattggaaatatggaaattcagaagcattgaaaatggtattgtgaagatgtaacatttaatgagatggctgcagaatgcttgccttgagctaaggttgttcgaaaatgaaatgcttacaaggaaggactgtgctccaagctacatggctgtacttcaaaaatgggatcactgtcccagtgcaggtatggcttgggcatctctgactctttgccaccctctcatgttccaatgcactctttacttctggtgtgcaccacacattaaggacgtatgtaggtgagccttactctaaatgataaaaggattactaaaaatgtcatgccatgactgtgtgaaaacaaaatcataaatgaaatgtaccaaagaagctgacataccaatattctctgttacctctattctaccagtttttaaattagctttaggaacaaaaaaatgtcaggcattgggacagggttataggaagaaacacttggtgagttcctcatcacattcggaactctatccatttttctttcttttttttttttttttttttttttttttgagacggtgtctcactctgtcacccaggccgaagagcagtggcctgatctcggctcactgcaacctccgccctcagagttcaagcgatttcctgtctcagcctcccgagtagctgggattacaggcacctgccaccacgcctggctaatttttgtattttaatagagacggggtttcaccatcttggccaggctggtcttgaactcctgacctggtgatccacccgccttggcctcccaaagtgctgggattacaggcatgagccaccatgcccggcctccatttttttttttttttttttttttttactttaggagacagggtctcattacattgcccaggctggtcttgaattcctgagctcaagcagtcctcccaccttggtctcctgagtagccgggattataggggtgtgccaccatgcccaacttgaactctatccttttatataacttatctccttgaattcttgcaacagtcctaagtgttaggtactcaaatctccaaaatgaggaaatgaagcaaaaaggagagactgggttcacattcaggctccaaatgccacacatcatctttgtcatatcacactaaagagcaaaagagctatttaagtctcttttataaatgcaaacttcaaagccttacttttaaggaattgttagatcattttagacctgtatgtttacctactatatattgaaataaaaactggccagtgacctacctttaaaacctagctttaaaaccctaatgctataaaatcaaactctcggccaggtgtggtggctcatgcctgtaatcccagcattttgggaggccaaggtgggtggatcacctgaggtcaggagttcaagaccatcctggctaacacagtgaaaccctgtctctactaaaaacacaaaaagttagccgggcgtggtggtgggcatctgtaatcccagctacttgggaggctgaggcaggagaattgcttgaacccaggaggcggaggttgcagtgagcctcagatcgcgccactgcactccagcctgggcgataagagcaaaactctatctcaagaaaaaaaaaaaaaaatcaaattctcctggctttaatacatgtcaaatgcaataaccttgaaaagaggaagagggtattgtaaattctatgtgacaactccttagaaagcatggtatgtgatatgtagactgctgaagttcttaactcttcttttttaaaaattagagttggtttacagaaaagtgatagagaattaatatttctccttcaaacaactatgactcaaaagtgagttcttagacttagaaattcatcctgaacaacagtgtatcatctctatcacaaagctaccagcgtctgtgaattgtgatgagaataaaggagacagtgctgggagcaggaggagaccccattttgatgggcacaaagcaagcgcatccattttggccaatttaaggacccacaagttttcctctcatgatcttgcaagcttgcctttctctcactgttccctttccttcgtttgtgtctttgtcctattctttccattacccccttgttacggaatgagtgcttgtgtgcccctaaaattcatttcaatatcctaacccaatatgtgttggtatttggaggccgggcctgtgggaggtgattaggtcgtgagggtggagcactcaacactcacaaatgagactagtgcctttacaaagggcactgatgcaacctagaagaagactctcaccagaccccaaccatgctggcatcctgatctcagacttccagcctccagaattgtgagaaataaatttgtgttgtctataagccacccagtctatggtactttgttatggcagcctgaattgatgaagaaacccctagttctatgtatacagtgggccctagaaacaaaaccaagtaataacaacaaaatggaatttaaaaagatgtattaagtgctggttctgtgaggcactatgctaagggcatcatgcgtgttcactcattcaagccagcaacaactgcaggaagcagtgtcactattttataggtagggaaactgagcagagaaagggtatgcaacctgcccagggccacaaagctctcatgatagagcatgatttgagtgctgggtaggcagagcaaccacgtggtataattctaggggcaccatgttgtgatgttctgtggagttgccctccggaggcacttggagctgtgtgctctagcagccttttggatcagccatgaacttaactgttaggctacactgttactctagaccttattcctatgttgagggatagacaggcatacatttgcgaacctgtacctggggcctctagtgagagaagccacatggaagctggtcctcatgctgctccaggcactaggtctgacccctatcaacagggacccattcatcttaagggtgcctcactgactctttttaatacttctttgcccttcccaggactactgccacagtacagccaggttccaacttcagggggagtgagcctagagggtggggcctgagtggtcagctgcagagggaggaaaggcacaagcactgccttttctgagtgtctcaaatcttactaatgtcaaaatctcaaccatcattattattactagcactgaggttttaagggcccactttttcaaaatgggctcagaaaggggaaccttcccctgctactgccctcatccctccatccctatgccatgttcccaccttggtttgctatgcttgggcaagaaaaacgacttcccagttttagtcagttcatttcctgttgtgctttgtgaggagcccagcagcactaagtggtaacaacagttaattagtttccctttctagataaggtatttctgtgtcccccttgtccctaggcctcaggtcaggagcttgtgggtacgaatgaggccatattcaccttaatttcttaatttctgtggctcataattccctctggtattgctccaggacccccttactatgtatacatttctaggagcttctatgaggtctgtcacatatgcttaagatcaagtgtgtgccctttgagtgtagctactctctcctgttaatctgtgcctggcatctgctgggatggctgggcagctgccctgaccactgagcacccaaccatctgttgtcagccacaacaatttccactggtacctgatgctgctcttctgggagaatgctgctccacctgtgaggccagctcatatgtgacctcaagctaaaaaagcttccagggaccaaaatagcactgcattctgcccaaatagcaatgtcagttcttgcttattgcaaaattgggggttgagggtagttcctcttgataggggtcagatttagtgcctggagcagcgtgaagaccagcttccatgtggcttctctcactagaggcctcaggtacaggttcataaatgtaggcctgtccattcctcaacttaggaaagtgcatagaaacagagggatccggttccacacctccaactcagtttagactcatttatgttgaatttgaattttggcagaagaaatcagttactcaaagtatttattttagcatataggaattgttattgttcatctctctttctctttattttttggagacagtcttactctgttgcccaggctggagtgcagtggcgcgatctcggctcactgcaacctctgcctcctgggttcaagcgattctcctgcctcagattcccgagtagcttggattacaggtgctcgccaccatgctaagttttgtatttttagtagagatggggtttcgccatgttggccaggctggtcttgaactcctggcctcaagtgatccacccaccttggcctcccaaagtgctgagattacaagcgtgagccaccactcctggccctattgttcatctcttgatcaatatcaagaacaaaactggttaaccatatatgtactataaaatgataattggaagtcatcaccaataatatgttgaaagagaaacatgaagaagagatcaataatttaacattcattgaaatacaagtttcacttgatgacattcagaaaagatgacattaacaatgattccagaatcaactctaatgtggtgaccacaaacacagacagacgtctggacatgataaagttaaatttcaagcaaagtgtactcactaataacttaataagagctcctcagcacattatgggttggagctcaaggaagacacttgaatccaatgacgaattgttttagtttggagaatatgctaattttcttctggtaataattttagaaaacataggttttcttttccaggcaattattttaatgaatcaattggggtttcaagaaatagtcaaaagagttcaatttggtttcaggttcagcaaaatgagatcatgcattctgtttttggttcagctggggtcaagtcctgtgcctaaaacagactaataggaattgagataattttatttttatgcacttggctcctctcatctttcctcctatttttctttcccaaacatctatagatcccaacgttttgatctcattgaactttttctgcattgtatattaacttctctcccctcccaaactgagtttattctcagctctctcagtcctttattggactactggtacaatgttgcttcctacacacaagtgggatattgatgaaccaacacgttactccttttatttatgccttcactcttattaaactaaatgatgacatattatatcatgctaataacacatgtgtggaaccagaatgggaagtgacttgaaagtaacatcatctctcaaaatacaaatgcccagagcaatgctcaaatgagtataagcacatagttaaatggttaaaaataatgtacatcagtaaaaaacgtaaatcggtaaaaatgttccaaataacagcttagacaatttgtgagatcaatgatagaaatgataatgtagagaagaaagaatttctttaacattttcaaattgcagcatgaaattggtgttggtgttatattgactcttggcagaaatggtttcttcctagacacatgaagaataagctccagatctttcttacctgttatggtggctttgttgatggatggttggttgcacatgggtgatcttctgacaaagacagaaaaacacaaagcagtaaatatgtggggcttattgatttgatcactctctgagtcatttcagatatagcattttactttaaagaattatttttaagtttggacacgcaaatgatttctttcagactagccagacaagtccctaggcgttctttgtattatggctcagatcacacatgtccaaaaagaaaactggtaaatctcacagtgattgatttggggtaaataaagctgatgtaagtgtcactgggacatgagagaagaggaaattcttacagactttattcgctgaagccagagcttatagactctgaatttgaaaaagcagtcaatttataattgtcttccctaatacagggttaagaaatttttattgttggcctaaattctcgtgattgcctgtacattatcagaagtgaatgatttgttgtaaactatcttataattagagaagctatttgaactttttcctttcttttcttatattgaaaaacacctctgatatatttgttagagaggtatattaatgacttgtccaaatagatactatagaagctttagaaatactctaagccaaaggtacttaaataaattatatcttgtgttctctaagttttcagatgtttgccaagttccacaaaatgactataaaccccttgaagtaaaaaaaaaaagcatgctgtctgattaacttatattccctacagagcctagcacaatgcatccagtattccgtcagtgcttaataaattatgttgaaaagaatatcatttataaagtatccatcaacatttttgaaatataactttataaagttattacttgtaactgacagcttttaaaatataatgattaaaaaacacttttagatacattcaaagatgtctgatatatatatatatatatatatatatattaggtatataataattatatatatattgcctctaccaagggtgaacacttaataaacacttcttgtggatcagacattgctaaataagtactttaaatgaattatctcattgaatccttacaataagccttaaggaagtaagtttcattgttctcattttaccaatgagaaaaacaaaactttgagaatttgaagaacttgttttaagtaacgaagctgagatttgaactaaacgaatgtgatcctagggtctatgctctgctttgctgccttagtttgagatgtttttgtggaacctgcatgcacagcctcacatatgtgccaatggcatcaatctcttcaaatatgccttgctgagatgatgaatttcttagcagggtgggggaaagttggggaaagcagcctgggattttgtaaattctcactggttccactcagcctctggctccctttcattgctcctaaggttattggtatcgatttgggattaaaattttgtgtttgattgaaaatgcaccaaattttacttctgaattattttagttttttttagttataaaataaaatggttgggggaaaaatggggagaatttaaactcgataaaccaaaatattaatattttaagcagctgctctgaaatagctctggtctatataccagtaattatcttcttcttcttaaatttttttttttttaaagttttgagatagggtctcactctgttgctcaggctggagtgcagtggtgtgatcatagctcactacagcctagaactcctgagctctagtgattccccccaccacctcagcctctcaagtagctgggactacaggtgcatgccaccatgcttggctaattaatttttttttttttagagatggggtcttgctgtgtgtaacagggtgttatctgttaccttctggctaagagtttatcattcaaataattgatatcctgattactcctttttagtccttgctctgtgaaaatttagaaaccattgattttgtctgggaatggtattaaataaatattttcacactcttctacagttttggaaaaccaaatggttgactcaattctaattatctccttttactatcaatcctacaattaactggtactcaggaacttgatatctgaacaagtaatggcaagcagaaaatattaatactttgatccatggttgcctcgatacctcctctaatgacagatgagccagaactcacttctggaataaaaaatctcaagggcaaaacaaaaacaaaaaacccaaggtgacaagaagcagtaatgtgttaacaagtcagcaatgtgcatctgaatacccacccaggggctgggtttggaatgcattcttcctagactccttttctgcagcaaataaaaagggtggcttgtgcaaaggagcacatgccttccataaaatccaaggatgagcttggaaatgttctagtggctctgtgagtgcccagcaggaaaggttctgattctcccagggtcatcatgtgatgaggcagagttacagcactttgttctcactgaacagaatcgagtttagccgtgaatagattgaatcctactattctgatacccaaagaagccgatttggtttgaatcagtaatggaggcacaaatttgcattgaccaaaaggaagaccacagtggcctttacttagagtctgccagataatactgtttggttagatgtcaccctgggcattgacaaggcagagaggaagttcaggctcaagctatgattttctgttttcttctagctcctcctttccatttcaatctgttccatccctgtatgtcagctgaaaacttctgtcttgcatagaaacaggcctcagatcgtctctggagcctgactgatcaactatttacctgccacagatttaaatgctggtacccaggtgaccacatgtaaaggaagcataaagggagtttcttgttcactttttaaagacaaaaatctcagtttcctgggtaaaattcgagactaaaaagtttgggagtgacaaccagttaacttcatttcttctgcagagctgagactttctaagggggaggtgattgaccttacaagctaccaaatccccaaagcccaagggggccgctgaggtcagtatgacattgcacggccacgttacatagaaaacgtgattggtaatgaacaggtacctcaaagcatgccctcagattttacatgctgagttactactttgccctttcagcgaacaggcctttgcagactgatagactctgcattatgctaggcacagggaatacaaatgtgaaccgactacattcctactcactgggaactgacagtgttcaggagcatcccaacagacaaacaggcaacaggagcacagagagctacgtgctaacataggaatcaagtacaaggtacaatcagacagagatggaaaggcacatcactttgattagggcttgtgggtgtgtgtctatgttgggtatcatcagggacaatgctccaagagaaattttatttaagctgcaaccaaaagaatgaatgacaattatcccagtagatgaggagaggaagaagaagatgagaagtattcaggctgagagaataggactgcaaaaattcattacctggaaaaacagaacctaatgggttccattccaatagcttgcattgttacatttatattgatttttaaaaacttttttctatcacaagaagtacttgaataacggccagagctatttttgataatgaaaaacgtgaatctgggaggtcaattttattactatgaaatgtaaagttcagatttctcattgtttttaagaagtagtaactactatgaaatgttatgcacttaggtaagttatagttcctaatacacttatatttactatcctcttaatatgatttaaatgttttttttccttctggaaaattatttgaagttggcattttaatattttatttcatattaatagcagattttttttaaaaaaatggacattgaaataacagcaaaccagttttccatttaatattgaaaaattacttttatctttttagatttttttgcctttatcaagaacctgaaatgataatcctttcccatctttcaaatgctttccctgttgtcatataaaccacaattctattaattgctccatgaatgctgctgatctgaaagtcagtaacagcaggagaatcaaagatctttgctatgatatggcgcttctccaaatcatcgttgtcttgagaggatgactttcagctgatcttaaggtgtgatgagattattcacccacggttaatttatgaagtaagccgaaactataaagttaccctgagtgtaaataactgggcggaggactgatcatgccaggtgatttctgacagatggaatcaccatatttatttgtcatactgcttcatttctgatattagaaccatcaccacgaagtatttatagaaaattaacaggacatcatatgacttagtatacacagacaacatggcaacaacacagagaagtctaacatattgccttgggctcaatcaagttgagaaaacttatttaaaagttcagcaaaaaagaggggggaaaaaaggatatcttacttgctaggtgctcgatcttgcaaattagttaatgcagcaaagttgtttcgtacagttcgcagactggccaagacctacaacaagaaaggattcttgaaacttcttgagctaaggccattttaaatacacttgaaaatggtttgttaagagaaaacttgatattgcttgcaacttagtttcatataccactaaagaatctcccaacacttagtgcagtttgtaggtatccacacgaaatccagagaggccagactgcagaaattttccagaaatccctccacattgtctatgcacatggtgacagtagcagcagtttccacagtatttctgggttccttagtcaccaagacaatattccaggcaatacacagataacatgattgcatttttgcacatttcaaatagtataatataaaatgctaataaagctcactttagggataaaaaattccctactcccaaatctcttcaaaaattgatgaagaatctcataataataagttggcaagtgaagtgaattttaaactgtttttctacctttgccacatggctactctagctagtaagcagacattgttttcttttgttaaggttatctgaattgtgcattgtaagaagctctcagggatgcgtttcttatgtaaaatgctacgccctgtacatgcacaatgcttggcacacagaagatactcaataaaaatttgttgactaaatgaatacatagacacaacatgcccacacacataacaaggcaggaccaataggtgtcactatctctaacagtcgctttttctaattccagttggaactagaaagtagccaacggactggaagtgagcctaggagaaggttcctagagccttatctccttcttccctcctctctttctcctgaaatgggcaagtttccccagggtcaaacccatattagatgggattataggtgatttgggtgacagctagagtgctaagtttatgtaaaacacagattccaaatgtctgagtaggtattacctaacaacccagactgtctggctctgttatgtagtaaatgtgtgaacttggactagatatgcaacctctttgtacctcagcttcctaacctggaaaactgggatagtgatacctacctcgtagaattgttgtgaggagtatatggaatgacaggtttggtgccaagaacagtgcctggcaaatagaaagcattcagccaatattagcccatgatggcagcgttacctttgacttaatgacttggcatgcacttgggaaatttacttaatgcctagcattggtaattcaagagtctccaaagttttaattgcttcaaagtttccagagttgttttcagaaatgtttcatctggcacagacctagactaaaatcagtctaattttttttctaagacaaaaatgtcccagactctgttttgttgttgctgtttatgaaattgacattcatttgtgtaagtcaatggagagctgtgtacgccttgggacagtgacttagagaattttcccctaaaggagttaatgctgcttcctaagaagccaaccgtgattaactcagtcactggaaaaacctggctcattatctcatataaacaacccacggctctgaaaggtcacgctgcctatgatggagtattcaaatggccgactgctgacatcagaccacgatgtctttcattaggcatgaaatcttgaatgatgcagaagtaaatcggataaatgatccactgtcgttaaatcatgcaggcttaatttatgttttaagaagtgaatatcaaacatactaatggaaactttaagataaaatcattgcaccagctaattgatccccttcctaggcaaaatttttaaccctagaattctgagatttttattccaatacataatagttaagttcattgcagttgacagctgggtaaatagacatagaaatgcaggcaacttattttctatgatcatttgaagggaaacatcagtcatgaaaagaaaaattagttcatcaaagaaaaaatttctgtagaggagtttttgcctctattataataaacttctaatttaataagtaatctaatttaatattattttgtctttgtttttagtttaaaatttatgtatttttgtataatttatatcttcacatgcttcagaatttaaacaaaagagtataaagcaaaaagtctccccttcaatgattaagataaaaatcaaaattattattacttctgaaaagacgcaatagaaacagattaacctggggagggacactcaggggacattaaaatactgataactgttctatttcttaaactgttcattttagtattattctttatattttacataattacaagctatattcccttatatatatgaaatacttcaaaataaaaagtgaaaaaaggaatctgtcttccggtctctccttcagacaatcagctgcctggccactagcaatcaacttttaggttttctatcttaaagttgtttttgtacaaacactgttgcaataaataatcttgtagagaaattatttcctaggcatgccagtattagattatttattgtgtgtgtgtgggtttttttttcttttgcagcaggacaaactattttataaattttatgtttggtgttaactattatcttctacagtatgacatgtatgctattggcagaagtgtaaataacatttctagacaaatcttataagggggtgttgtcttgggcctcgctgactgactcttggtgtcgtcatcactgttatcactgtgttagtcttttaagctttcactttgcattgcagggcacaaagagggagcatctgttactgcaggctgtggggagaactataaacagttttactgaagcccctaagttaaagttccattgttctttgcttttgttcagggcagccctcacttcccctgaattcgactctttaagaactgtagtcaaagctttaaggctccttttacagttgtccttactccttaatgcttgctaaccaaaaagatccctgacgtttcttccacagagctcaatggttagaaaattaaggtcatttctttctcttctgccccaccaagcagaagtatagccagtcaatgtcaaaattacattgggaatgatgagaaatatatattccttaggaaggaaatactggtagttttacagaaaaattttagacaaagatggttcatgtattagcccatggggaaggattcaatgttatttacgtacactactctcggatcttcttaggtgcttctaaacatttattaaacaataagaatcactgaaaatagcaggaaaatacggttatcatttaacacttaaacagctgaacatcatagcctaaaaaaaaagaggaaaataaatggtttcgaggattgtttttcataaccatatacacttgttaccactagatggcggtaaaacacagaccatgaggttgaggtgccactggcggcggaggaagcggcgacccgcactgggagagattcattacttcggttttacctccggaaaaagctggagtcaagttatgcttatttacaaaatagaaaggtcatttttatgaaaagaaaacctctttccaggttatgttttgtttaaaccctatgaaattgctggtttgtacaccagaaaaggttgatagacaattttatatggttcgctcttaaaaagaacttagatgtccagaagatagtagttgtaatttaaattaattaaggctaaagaaaagctaaaaatttagcaccgactgaaacgaggtgactatcttctttcatagcctggcagggagggcctagcacagtctgcaagcttgaggatggtgatgaggccacaagatcgttgctgctgggtgaagtggctgagggacaggcaggaatatgagaatattggttatattttattaccaactaaatggtaatattctatagtattaataactactgcatttttatcctagaagtatcccaggtgctgtattttggttagagtaaaggtaaagagatgtagttgttcctaccccgtttttttttttgttttttttgtttttttttttttgagacggagttttgctcttgttgcccaggatggagtgcaatggcgcgatctcggctcactgcaacctctgcctcctgggttcaagttattctcccgcctctgtattttcaaatcagggatatctccttagtctgaatgaagtgagggtttctccagggatccagcataatgcttgggttttcctgttttctctttctttcatcagagtctacttcatttaacattacacacttccacatgaaaattctagtcaacttagagttttactacagggtagttgtgtcacaaatcctgggatcactgagcccggaggcagctgacagcagagaagagtttcctacagtttatcagcattgtgcctccttagtgctccttggcccccaagaactctggccaagaaaaaaaggtcagttgccgcgtgcactccagtgggattcctctctagccttcgtgctaaggaaacacccacaccaaaagatttcaacacaaacacaagagaatactttaacaattgaaataagaaaaatatttaaagctgtcactttttctgaggaccaaagggattctgagcttacaggggaaagcataagaaatcagaggtggaaaagagtttaggttaaacaccagcaagaatttctagccctgacagtgttttagacaatgggataaactatggagagatactataggatcctttctgaaaattactatccaagatgtttcaggctttagcctggccaaaaaagtgcaatctatctttgcacggcttcctaaattctcctctaatttaggattttgctcttttcacgtcaaaggaaaccatgatttggaaaccatgattcgtgttttggagatggactcaggcataaagaaatgagttctcaagaagaggcagaagatgagatggatttgggaggggatctttgaacaccttagacaggggaaggccatttttaggagccatgggacagaaaatatgcacagaaaaataaatctgaagggatataaaataaaatgtcagtagcagttattttggggtttggaattttagaaaattttccttttctttttcttattatttttctaaacttttatgcaaaaagtttttgttttgttttgtctttttgagaagcatagctttttcactggaatttagtgtgaaattccaattttcaaagcatgctgagaaaagagggtaattctttggcctacttggctaaatatttttctgagtgacttttctaaaatccattgttttctgtcctttggtgaaagcaattatggtatatcaggacaaattagattggtatcacttcaagtgacataagtatcttatatttttagttttaaatagttaatgctaaaatagcacttaccattaagtggtaagtgctttactttgtattaaagaaaatttgagaagttagtgattgggtcagcaaaacatgccaatcatgtccaacagggtttaagagaaggccactcaaacatactcactgggacttctctcttaacccctccccacagatgctctatgaagagtggtgaaactcttcagggcttaacagttttttgttttgttttgtttttaattctagtggggctttccaggtcttatactccagtaaaaggccatttgtgaaaaccatgatgaagccccttaaaaaaaatcggcagcctctcaagtaatgaccactctctacaaggtgttatgagtcacttagctaatcataagcaaagacttaatatactatgggattatttttaggcatcagatatgcctataaattatacagctgatttatattccaagttctaatttcaagtatattaagtacacatcttttttatttaaatagcttactaacatggactaaattacatatatgtgtgtatttcccaatatcttgaaattccattagttttttttccttggagattataggtacactacagaaaatatctaatcaggtaaaagactagatttccttggaatttaagagcactgatggcagggttcaagtccaatttactaatctatttgttgcagcttaataaatattacttgatgtaaaagaccatatatcatacacagaccttttttcatttgttattaaatatttatatatattttttcttataataatacctagatcatttggttagaaacaagaatagctacttgaatgaactcaaattggaatgattggttctatgtttgatgatgttacttacattgttatgccatattttgtctgttcacctctctctgaggtcttagatatagaattataagttttctttctttcctttttttttcttgacagagtcttgctctgtcacccaggctggagtgcagtggcatgatcttggctcactgcaacctccacctcccgggttcaagcaattatcctgcctcagcctcccaagtagctgggattacaggcacccgtcaccatgcctggctaatttttttgtatttttagtagagacagggtttcatcaagttggccaggctggtctcgaactcctgacctcaggtgatccacccacctcagcttcccaaagtgctgggattacaggtacgagccaccgcacccggccataagttttcaatagtaatcaattaaaaaccctcagctttataagattttgctatcacatcatattattaaatcatacaagtgtaaattttttggacacagaaatacaggtactagaaagaattcataatctccagcaaaaccttcagcaaacaagatattaaccatctgaaaaggatggtgattgtattttatttttaattgcctgcattaatttaaaaagttactattatacattatgttacttatgaattgattatattataggtctaagttacagtaataaaagtttggaaagttttaaaaagtagaactatacataatcctactatctaaaccctattatccatttaaaaaataatacttatgacattttagaaatgaaagaacattttcagctctatacatttaaaccaatcacaaagtttttataatattatattttcaagcaattgtgcctagcattttataagcgtggtattatttcagtgtcttagcaatcttatgaggtgggtactcttggaactgttatttaacagaggaagagaccaggcttggaaaagttcagtgactcgctcaagtccattgagttggcaagaggcggtgaaagggttttaactagatctgactgtctttcatccagctcagtcccctaactctaccagttgaaaaaaaagaggacccagaaaatttaagtgagttgtccaaggtgcaagagcaccttgatgtatgatataggcctgattataatttttacaacctctcaggattacttgcattttaatatttaacatttcttactcatcagtgttggttttaaacctgcttcatgccccaggttaaatcagttttatctcattccgcccttagttgtctataccagagactctcaacttctcctgcacactagaaaaatactaaggcctttaacaaatacagatgcttgtaacagatctccaaatttttggatttaattgaccagggctgcagcctgggcactgggataagaggtctctaggttaatctaacgtgcaggtagggttgagaagtattggtctatacatagaacatctggtcatcaactctttcatatttatattcccaaacattttagatcatgttatcacctgcttgcacatatgtcatgtggttaaagtattttcatgatttgtatgcctagaaggaagaagtaaacatcaacacatcactcagctaaatctctgcacaaatggcatatgtaaaaaagagataaataaggtattgggttgaattggaatattgaatttcaagcactgatcatgtacctaattatactaaacataacttaagccatgatatagccttctgcttctagtgcttatgtcagtatgagcccaattaagtatatcccttagctaatttattatttgaagcaaagacactctttggtactatgggtttataggaaacagattaatatagccaaagtcactttctctagcattgcttttgaattgcttgaatgaaccaagaatttgtatttgtacttgtgcttgatttaaaattaaattaaattaataacccgaactaattccccaaattaaatttttacatctgtgagaaacctgcccattcaccaagctgtgcttacctgagcaaatggagtcacaatcaagtcatctccgtgtctgaaaaataaaccaaatcccgcattagaaatcatcaataactctgtgctcagtgtcgttcaatattaaacggcaagttccactttcatgagttcccatagagaattacagtgattccatccttatacttcagcacatgttcttcccagcaactgggttaaaaatatgtcttctgggatgttaacaattgtccaactccctgggtaaaaagaggggcttcttgatcatcagccagggtcactgttgctttttaggcacacaggatatgcaatagtagaaatggtgttccagcagtggggcctgagttttacttttggcctcttactgtagatattagtaaggggtgctgtggaaggaaccagcaatgcagtgacttcagtgagagaacccttgaccatctaatatttgaaggtgattagcatggagtgttccacatcatcccgtgtaagtcttggacaggctaggaactgtagatgacatgggactgcatcatacactaataaaaacccagtgaaatgttcaactgactcatcccagccactgtagtcactgggaaatgttactccttgtgtgctgttgctgcagcaaccccagctacaccgtgcctggggtatgggagcaaggtgtcagcatgacgtgtcttggagggacagggaagggcaaggaaagttgtgcaacattccagttagaggaaagtgagaaactggggcccagggttcttttgtggtatttcttagcatgaataatttgagacaaggatttccagagtcaccatcagctatttcttgatctagctagataaaattcttaaatcaaaagtgaatgctgttattcaacacagacagctccctggacatggccctgagaacagtgcaaataaacttttcgctcactcatgaacaatctgaaaacaacctgagtgacccaaaacaacacccatgaaacatgctggggcacagggagcatatggatgatgttactcaataaattgttaccaatagctagaataggtgctgtggtcgtcatcaaaccatgtggagatcttgaaaataaaaatgtgggaaataaaagcagaagaaggaaaaaacaatgtaaaggaagcatgtgttattttacacccccttagttccagaatcatgtttttcaaggggcacctgctctttgtagagattattcatagaactctagaactctaagaaggtaggacattgggttttatgatcattttatagaagaggcaactgaggttcagagagggcataaggtctaaaaactaataagtggtagaggcaggatgtcaattgaaaaaggtattttcccatgttgatgtttaattgccattgcaacagtattaagaggtgggggcctgtgagaagtaattaggtcaggagggcttcacactcatgaatgaattaatgctgttatggtgggagggggttagttatcataagagtgggttgttataaagtgagcccagcccctcatgttttctcttttgcatgtgctcacttgcccttccatttttccattgtttgggatgatgcatcccaaatatcctaatcagatgctgatgccatgtccttgaactacccagcctctagaactgtaagatataaacttcttttctatataaattaccctgtctatgctattctgttatagcaacagaaactggactaagatagtgttcttctgtcatcaataaataatttacataatttaccttgactctcaaaaaaaaaaggtcttctgaggtcaagcccagaaaggctctttcctagaacaatggcccagggtaggagcaggcctggtgcactgaagtggcaaggaggccattgagcccgtgggagccagcagagagggatgaagccaaggaggcagagcagctgcctagatgagaaagaagcagatacagagctgcaacgagaagctcggtgattctagagaatgccatggaaggcaggaaattcagaatcatgggtggtaacgagccaggcagcagatcacagagcccttgtatgaaatgtacaagaacttggattttactctctgatggaagtttgggttggaatttcagctctgccacatactaggtgtgtgaaattgtgcaagttattaaacttcactttcccttggcctcttcatctgtaaaatggagataacagcacatacatagagtgatgttttgggattcaataaattaataatgttaagtgctgaaaaatgtgcttaccacacagtaaatgttcaataaacatttctataataataattagcagcagtagtaaaaccttttaaatcataatgatttttgctttcctatgcagtcaggaaattgcaaagactcagaaaactgatacttcgctaagaaggactcttgagaccctgtgacaggtctataaaagattgagggctttaaaggggcaaaaatggaagcagggagaccagtgtagagaaaagaagagatgaggacctaaactaaatcagtggtagttgagagagagagagagagggacgatgacagcattaaaagctctgggggaaagaaaaagttctggggaaaaaaagatatgaaaatttcaagcatttacaaaagtaaaaagaatgttatcacagcaagtgtattttatatacaatcatcagctgttacaacaatgttgcaaggtaggtgacattactcccatttttcagatgagaaaattgtagctcaaattgattaagagatttaacacaaagacacgcaggtagtaagctgcacagccatacctggaatggtccccttttgtgatatgcattggctgattcctatggaacagcttaaaaagattaaaaataaagctctaggaaaatggcccaataaatgcaaattacaaagtgatgccagggttggccagctacatttcttccttggcccatcattctgactttcccttctggctgtgtcatataggtaaatatagggctgcaatttctcttatgtacttattttgaaacagtagcctaactctcacaaaacaactgagaaatatttacagatacaccagtgtttaaaaagcatgaagacaaaatccagagctaaacacttcagcatttgacaaatttctacacacataaaggcacctttagagttcatttgaagccaaacattcttgggagtggtggacaaatcagtaaactgtgtagtgtgttagaagtccgaagacaaaaaacattttcaataggtgtatatactacatatattgcattcaagatagttcaatggtttctgacattaaaaaatgttattaaaaattccataatgggaggtatattacacaaggagaaaagacatgccacctatgccgacttgatttgccagtctgataaactattcatctgcttcagtgcatggccaagctgaagacattgtattgtaaaatggatgagaggcagttcagataaccaaaattaaaataatatgacatcttcttattgtcccaagctatagtctcttctttcattttattctttataattgacctactataaagtttatttttttcaggactaagtcatcttgacaaggcacatcatcaatctgaaatgaatccatggaaatatgtctcctaattttttatatagattgcagtggatttgaatctttcaaaactcaaaagggttgcatatttattaaaacatttaattttctctttggttgtatctcctttataagtattataagtaatacactttacaatatttatgataatttaccagccttttttccctatgaaagcataaagacagttatcattttagtgaaggaaatatattactttttaataaattgcccagaaattgtttctgccaaatatctcaagatggtctcattttagtaacagtaaaatgatacctagcatttcagtggcagatgtcctcgataaacggcaggttatagcctatccatttattttcaaaagtatgtcatgcttaaattatctttgaatatatacctaacatataattttaaaatctttgtctaagtcctcaactcaatattaaaacagatcttttcagacatactgtcactaggagaataaggcaagtaaaacctatttttatttgtggttagaagaaaataaatataatacaaacatatctttgaattgtgtcttacactttgcttataatcatttaaaaacagatctggtagttaagatcaacagaagattcactttgtgaatatgatttggtttaaagtatgtgtgggttttaatgaactgaataatcacatatgctcaaaaaaatcctatgaaataaaataattctgaaatcttgcacctgaacaactttacccacagaagctttttaaagcgccttgccacgtaaagtggggctgggagggattacaatacaatgtaataaattggggcttcctaggcctacttggctaaatatttttctgagtctcttctgagatgggaagagactattagggtctctataaagtgactgaaaagctagattcaaagtcacacagtgaatatcgcctggacattttgaaattgtaccgcctggtaatgtgaattttgggtgaggatgatgcaatactgtctttcatttaaataaaaacaattataacaacaacaacccttaacaaaaaacagctgtgatctgttttaaggaaaatacagctcttttaaaaaaaagaactggagtgttcatggaggacaggcggagaatgaatgagggataggaaggctcagaaaaaaagtcattttgacactgcgtgtctatatgtatgtatgtatgcacacatgtatacatgtatgtatgtatgcacatatgtatgtatgtgagagatgagattggtaccaaggtaacagtcacagcagaatgcaagtgcagaaacttctagaacagccaggatgagccactgtaggtcactgtgggagtcagtgtcacattggttttaaatttcatgatgtccaaggaggtgccacatgctctgtcaccttccctggttaccaggaagtgaaccagagtcatcttcactagtcctggcgagccttgtctctcccaaagagaaagacttgctgagtcctgagccagcgctgttgaaagcaggagaatacagggctcaacagtatactattgtctttttttttctcacaagagaaatgacagtagagtcaggaacttctattctctattccccctcccatccttcttctacttctgtattatttatcacgttattttctaccctttttctttctgtaataaggaaacagaaacaagcaagaaactaaaagcaagaaatccaaatgcccacactcttatggtgactttgttgagatccatatatggttcaagtacttaaaaatgaaaaagcctgttgtcatcttaaaaaaataagttcaaccaacatcagcacctgaaaatataatttcctatagaagttcatttcatgattggttgaaatcttaaacacactaggtggcaatctttatctgttttactattacgaaatcataaggaaaaggagatacagttaattagaagaaagtttttactttatggagcaaagacccctaatcctactatatttaaagcattagtggccatgtaagacccactgcttttgaatatcacacattgcaaattttagcatgacaaatgaatgcatgaactagcactgtgaaggagtcacaggctggggcttacgtttgaatctaatcctttttttttttttttcaatggcatggaggtttgctatgttgcccagactggccttgaactcctgggctgaagtgatcttcctgtctcagtctatggggtgcctaggattacaggtgtgcaccaccgcgctggccgaatggaatcttgtgcaaacttttttcatcttctgtgcttcactcactcttactagaaagatattctcctctgaagtttgtcaataggattaggaaattgataaacatatagaaaattaaaataatatttttgaaatatattttaaagtccaagattttgataattttgaaatcttagtatctttctttcctcagcctaaaaactatcatccatctatcaattcacccttgacaacttcttttagaattatagagaaacaagtatgttctaattttaaaatgaatataaaaatatttctgggagcctagactatttgacaacacccaaggattagctataggaggaccacgtctactcacaactctctagacccatcttcatagaagtatggacatataaaacaaacatataatgtaacctacttgatctttatgtgtgtgtatgtgtatatgtatatatacatacatgtacatatatacatacatctatatacacatgtacatatatacatatatgcatgtatatatacacacaggcacatatatacatatatacatacatgtatacatacaggcacatacatacatatatacacatgcatacatgcatgcaacatacatacatgcacatatacatacatgcacacacacgtatgtacacacatgcatgtacacacacgtatgcacacatacatgtatgtagacatacatgtatgcacacacatacatgcatgtagacatacatgtatgtacacgtatatgtatatataagtatacacgtgtatgtatatatgtatacatacacgtgtatgtatagatacacgtgtatgtatacatacatatgtgtatgtacagctacacgtatacatacatatgtgtatgtacagctacaagtatacatacatatgtgtatgtacagctacacgtatacatacacgtgtatgtacagctacacgtatacatacacgtgtatgtacagctacacgtatacatacacgtgtatgtacagctacacgtatacatacacgtgtatgtacagctacacgtatacatacacgtgtatgtacagctacacgtatacatacacgtgtatgtacagctacacgtatacatacacgtgtatgtacagctacacgtatacatacacgtgtatgtacagctacacgtatacatacacgtgtatgtacagctacacgtatacatacacgtgtatgtacagatacacgtatacatacacgtgtatgtacagatacacgtatacatacatatgtgtatgtatagatacacgtatacatacatatgtgtatgtatagatacacgtatacatacatatgtgtatgtatatatatacatacacacatatgaagtacatgcatacatatacatactttgggagatatagaacaacttaaagaaccattcaaagataactattgataacattttcccactgcatgtatgtgagcacatgtatgcaatatagtatgtgactattatggactacatacttccttatagaattagagtcatagtgtatattcaactgtatatcttgcttttagcattaaacattaatgaaccataaaaattatacatgcctttattcttttaaaatattgttaatgattccaatctatattcggtaatctctaaaatttttcaagttatgtgaatccaaatgtattaaaatgtaagcattgattctatttttaaataaattaaaaaataatcatatgggtttttcagacgaatttcagttcatttatcattcattcatttttaaaaagctacttattaaaggaaacatgcttattttaattaaatatacataagacaaaggtaaatattaaaatgctacatgagaaactgggctgcacaggtaattcatgggaatgttaagtattttatattgctacctgcttaaattaaaatcatgaaactctaatttcagacaacaaaaattctgtaaaatgtgactaccaagaaaattttgcaaaaccaaattattttttccatatagcgtttaaaagagatgatttgtttttccaaaaataatgttcactctgacaaattataaatttaagaatataatgaatgatttaaaattacttataaaggaggcattagatttttttataaactctaagtaatctatatagtaaataaaacaataccaaaaatacataaaaactgtttccttggtattagacatacttgaggatatggatcctctgtattgcttggccttttaatttgaaactagctccatttaagtcaaaataaattaagcagtacatctatttatgaaaccctagggaataaagttcctaatataataaagccaacttcagttacaagtgaatgtgcttttcctctttgaagctattgccacttagaattaaaataatctatttaacacaaaaacttgtattaaaaatcacaactaccaaaactttcaatttggcaagaatgtccagcaaccttttactgagaatcaaagaaaatgtaaattaatatatgagtaacattaaagctgtctagtattgtgtgaggtaacatcttccaaattgaaacttttcaacgccaaactcaggccacctgtttgtatatctgtgtatgcagcttttctggtgttttgatcatttttttttttttttttttttctgagatggagtctcactctgtcgcccaggctggaatgcagtggctgcaatctcggctcactgcaagctccgcctcccgggttcacgccattctcctgcctcagcctctggagtagctgggactacaggcgcctgccaccatgcccagctaatttttttgtatttttagtagagacaggatttcaccgtgttagccaggatggtctcgatctcctgacgtcgtgatccacctgcctcggcctcccaaagtgctgggattacaggcatgatccacagcgcctcgcccgttttgatcattttaaatattttgaaaaaattttaaagagatgtggggtctcactctgttgcccaggctagagtgcagtggcacaattcacagctgactgcagcctcaagctcctggactcaagtgatcctctcacttcagcctcccaagcagttggaattacaagtgcaaaccactatttttatttcttaaagcaggttagaattttttttttttgagatggggttctcatcttgaattttaactccgacaacttccacatgtcctgagaggagcctggtgggagatgactgaattagggggtctggtctttcctgcgttgttctcatagtagtgaatgagtcttatgagatctaattttttaaaaagaggaggtcccctgctcaagctctctctctttgcctgttgccatccacataagatgtgaattgctcctcctcgccttccaccatgattgtgaggcctccccagccacgtggaactctgagtccagttaaacctcttccttttgtaaattgcccagtctcagatatgtctttatcagcagcatgagaacagactagtacagtgaccttcaaagatatttagttttctgaaatttaaactgtttgctcacatcttattaatattttaagaattaagaaacaactcaatggcaaaaaaacaaataacctgattttaaaatgggcaaaaaacctgaataggtctttctcaaaacaatggcctgacacagtggcttacacctgtaatcccagcaccttaggaggctgaggtagcaggatagcttaagcccaggagtttgaaaccagcttgggcaacatcgtgagacaccttctctacaaaaaaattaaaatcaaaacaagacctacaaaaaaaggtcaacaggtatatgtaaaagtgctcaacatcactaatcttaagtgaaatgcaaattaaaaccatgatgagatatcacctgacacctataatagtttttttttaatcaaaaaaaggtaacaaatgttggtgaagacatggagaaaaggaagcctttttacactgttggtgggaatgtaaactagtacagtcactatggaaaacagtatgaagggtcttcaaaaaattaaggataaaactaccatatgatccagcaattctacttctgggtatatatccaaagaaaatgaaatcagtatgtcaaagagatacctgcactcccatgtttggtgcagcattaatcacaatagccaaaatatggaatcaacttaagtgtctaacaacagatgaataaagaaaatgttatatacacacacacacacacacactagaatcctactcaggcttaaaaaggggatatccttccatttatgacaatatggatgttcctagaatacattatgcttagtgaaataagccaggcaagaaagataaataccatgtgatctcacacatatgtggaatctaaaaacaaaatcaaacttatagaagcagagagtagaacagttgttcccagggactggagcagggcctgggggagaatgggaggatgtggaatgggagatgttggtgaaagggtacaaagtttcagttagaaggagaaacaatttcaagagatctactgtacaggctggtgactataattaataatcatgcatagtatacctgaaaattgctgagagtagattttaaatgtactcatcacaaaaaatgataaattgttaggtgatggacctgttaattgcttgatttaatcattccacaatgtatacatatatcaaaatattaccttgtatataataaatgcatataatttgttatttgttgatgaaaaataaatttaaaacaagaattagagcccggccccatctttgaccaaaaaaaaaaaaaaaatctttcaaccaaaaatccttaatttttggctcatgtgtgctcatatcacttgtggaggacaggcactgatgataaagcagatgggactgaagtttacgcaacataagcaaaaaataatctagtctaaaatggaatctctttatttgtcatgagaaaacaatttaggactcattagagaaaatacatgatgccaatgaatgccttcaaatttgttagttatatgatggcacaaagactatctctgttagaaatgatacaccaaaattttccaagttaaataattaaacaaatgtttagcacatgtgtgtagacatattcactaagcatattaggttattttgtttaataaaaaccaatacaatagagagacttttctaggacggctgatgtcccaaattatcaccagaaggtttgagtacaaagctgagagtctgacttccatggagggaagaaagacagcgaaagagttgagtacatgggcagggattcacaagtgctctcactttgtgttctaggaacgggatcttctttcacagtttatcttattggcaggcttgttcttaatgccagtggccctgcccttttggtttttcaccagaatgggatcctagggaaaagatttttggtcaactagtgcaacaattttaaaggtctgcatgtggtgaaaagattcaatagattaaaaggaagcccttgatcaaacagagaggagagcaatgtgttttatgaatgcctactaggcaccagacacggtgttctaccaacatgctgaatttaatcctgacaactctgcattaaatggatgctcatattcccattctaacataaggaactaggccctgacaacttaagttactcattggcagtcatgcccttgacaagctgacagaactcagtggtttccaaatgccactctaagatctggtacttgcccaacagaatgctcagtggtccttgtcaaagtcagagtgtacatggaccatgcagtgagattttttttttaaactatacgtattcctttggaaaattcttttattctgagattatgctctttctttttcactgaagtgaaaatgtctttaaaaaataaaattaacatatatattgatgggtaattccttgttaatgttctttacctggcaaaataaggagttagtaaccctaggtcagtgtcccagaaattttactgggtcataaaatcccaaggcatggaaatgttcagtgtagctggatttgagcccaggccttcaaatactgttttgtttttaccatgccgctttctgtatgctcaaatggatttagactattctgaaggcacatagaagtaaatgttttagactctagaacagcactgtccaatagaatatttctgcaacattctatttctgcaacagaatattctgcaagactctcggtgctgtctaatatgctatccactagctaaacacacacacacacacacacacacacacacacacacacacacacaccaatccacaaaaacaaaactgatcttggtggttataacaaattcaatttgaagttctgtaagcaccaaagaaaaaatgaattttgaaacatggaaatatgagatctgcatgtagctttgttctcccttgggagtgaaacaatgagttaaaaaattttggacttgggatcattcatgacatttattgggagacaacatcatttactgaactggtgaaatgatttcttgtcacatcacaaccttccacatttgttgaggggtgagcagttattctttttctttctgctctgaagttccctgcgtcttaaagagagggttgcaggaattgacacattatatatgtttagatacaactttccagtattcaatgtcagcaaatttttcttgacccaaggttaggaaaaaccataaagtctcaaggcaattaaccgtaggtggacacaaagcctaggagatgctgcagtaggcagacggaataattggggttgtttcctctgtgaacctggtgtgaatcataccacagattaccaggaatctgaaagcaaagcccagtggttgatattccttacttggttttctaaagaaaaaccatgggtctgcttgatgctttctttctgtttatttatagaagcacatctttagatgattcatattgcaagggcttagacagtatgatttagtaatactccctggaatatcttatctcaagaaacacatcacataaatgttccagcagtgtgactgtttttccttatatggctcagaaaacagtaaaggagacattgagaacaattcattaagaagctaagactgacaagcaaaagtaaatatttaaaatgattgatgtgtaagtgaaaacaagtattcatatgggaatctcagtgttggctggaaacatctccttttgtatcaagaatttttaaaaattaaataaagacaagaatgcatgctccaaacaatttttttgtcttactttcatggatctatggtgtcttcaaatgataccctggcatggagtaggtgctactgttattttccaaacgagtaaaacagtgatactcattcaaaaatgcacatcaattaatacacacctttatttagaatgtggtggaaaacacgtattggtcatctccaatagaagtcaactttcttcttcttcccagcctgccaccatatgccccaccgtcaagacttaaagttcaggctgtgcatagtggctcttgcctgtaatttcagcactttgggaagccaaagcaggagtattgcttgagctcaggaattcgagaccaacctgggcaacatagcaagacctcatttctgctaaaaattaaaaaaaattagccgggtgtggtagcatacccctgtgtttgggctactagggagactgaggtgggagaatcacttgagcccaagagctcaaggctgcagtgagctgtgattacactgctgcactccagcctgggcaataatagagtgagactctgtctcaaaagaaaagaaaaaaaaattaaagttcaaaatatttctattttacaatacactggagcatggttttgattttagtcttctttaatatacagagggaagagggttgagataaagtgagagtacactagtgtacctctaggtacaatatccacaactgggtgaaccaatatctctcctgtaatggccatttgcctcttggaatttcaagaggcaggaagaatcagtaattttcaactatgggtccttcatctaggggccgtgtttcattgagagcactatccaggttactggactagtttttttctttcaaaatgttcttcaaactttccttattttagtttatttcacacataatgtgctcttagagattgcattcttttggtatgcactgaaaaataggctaatcttccttgactgaggccaattctgagtttactttcttctggcaggaattcagtgtctcataggattgtggaataattgctcttgttattaaactaccacttctccctgcatttttttttaaagaaagtagatattatcctttgaaatgtattaaatctgatgtataagcataattatataatcattatttataagtttaaataattcaccttcacactctttctcttttatacaggagtgagaaaaactcacatgatttttagagttttttttttcacatttaaaagatttaaaagtgagttcagtctgtaatcccagcactttgggaggccaaggtgggaggatcacttgaggtcaggagttcgagcccagcctggtcaacatggtgaaaccccatctctactaaaagtaaaaaaaaaaacacaatcagccaggcacggtggcaggtacctgtaatcccagctactcaggaggctgaggcaggagaatcgcttgaacctgggaggcggaggatgcagtgagctgagattgtgccactgcactccaacctgcgcaacagagtgagactctatctcaaaacaaacaaacaaaagaagtgagtgcaaatactgaggaacatagtgagtataaaggaaatctagaaaataaaatggtatgctaaatattagcacaaagtcctagagttcgaattgcagcaggcttgtcatagaaacaatgaattacgtatatgtttggtcagttttcacttctttttccctctgctttaacaactttttataactaacatttatccctctatctctcctaagacttcagtatatatctattactttggcagtaatagccaagatatattactacatataactcaattaattcgttattttaaaggttagagcactggcaatgatacttagaggtgctggcaccatctcactgtagcagtgcattaaaatcaatgctttatttttatactgtggcattaaaaacattaccatttaaaatgtctaaacatcaggatttcatttttatgatttttttgaaagtatgagattaggaatataaaatgcctattcagctaatattttaaatcccccagttcaaggattgaagaaacttgtttagctaatttataagacttattttacaattcatgaaactcccatttttttaaatcagaaataaaatgacttaagtgattgaataaatggcaccaaataaagcagaatttttaaacaaaaagatagtaaaaaggtattctagtagcagatgaccttagcatattttgccaataaacttcttgagatttaatagctagtattaatgcctgcatcaacactccgaataatactagtaacagtggccagcacacagcaatggaagaaaaagcctggtctatctaggtcattaccaaaataatatcacattttataaaaaaagattttggctacctgggatcctaacagaattaagaaaaagataaattctctactctagagcacatcagatacttcacagcttggaaactgttatttttttaactcctaacaaaattctctcaaatagtctcacatagagatctgatttatctttaatcatttttttttgtcttgaggcagggtctcactctgtcatccaggctggagtgcagtggctcaatcgtggctcactacaacctcaacatcctgggttcaagtgatcctcctgcttcagcctcccaagtagctgagactacaggcgcccaccaccatgcccagcaaatttttgtattttttgtagagacagggtttcaccatgttgcccaagttggtctcaaactcctcagctcaagccatctgcctgccttggcctcccaaattgccaggattacagatgtgagccaccatgcctagcctgatttagctctaattcttcagatatgaataaacaactaatccaaatattttcagactttctcagtacatggtgcccttaatatctcaattttttaataacagcaacacattggccaaaataaataatagttccaattattaaatagttaagtccaaataacttaataaggttttgttctaacaatttagcacccactgagcactatgtcaatttctcattttggaatgagattggacattgcctcccttattttttgttgcacattgatttctgctcagcacttcatttttatccagcaactgctgaaaacccaattttgcaaagatatggtgtcacagaaaggaatatcatggtcttaattggaaactgggaactattccaagctattagttttccaggtggttgacagatgttttcgtgtttttcttgaacatttaaaataacgcttgcacccatgtacattccctctgttgcctcaggacacattttgagaactctggccctagtcccatcactcctacaccacagggtgaggggtgaggatacctccccagctgggaaaaacccagaactggggaagagatgatttggccatggtagctttctttctgtggttaatggaagaaagctttcaagataacaaattgatatgcttttgaaatgttcattagtgtaatattatcttgcaatctaggtaagagatgactacaaacttttcatgtagatccagtgagaattagaacctttgtaatgcaacgtgtctttttatttatattcttcctagtgagaccagggaagattaataatctggaataaaagatacaaattgacataaagggaattcttcttcctttttcaaactcaggactggaagcaatactactcttatacttagcaggcaaaagtagtagagaggagtggctgtgactgaaaacacacattagaggcccaagaagtggtgagggacttgttaattgctaaagaaaggacagtagtttgacatgggaggtagggagagtattatctactagctgagaaaatgccccaatggggcaccccgaaggcctgatcagtgaggtctgagatatctgtatagtgcctggggataacttagctagattcccaaatatgccccagctttttatggtatatcaaatctactcacttcctcgtcactggccctctgaatgcattcaccccaccccatattctgtgtgtagaagcaatgtatatgaatgtgagtgaagagccgattggatcatctttgcattctatgtgttggtgttaatttaacagaggatggggaatagaggattagttatccaggtgaattgagtatttcttaaaacttaagtagtttgacaggtaacttatacttaataaattcatagttttgtgacttaattctacttatcttgtcattgctaattctcctcttaatctttgcaatgtatcataactttatgtgtttccaaatacagatactatattactggatgatgtgaaaacacagaagtgattgttattcagatgctgaaatattaagatgacaaaaatattgtctatttacgctgtaattttcttcatgttacttcatgacaccacttgggcaaccagccttttgttatctagttgtttctactgttataaaaaatttttactattaatggtaatgcaagtttattttcatgtatttatttactagactcatgctaatacttaacatttttctttttcttacttttcttaagaattaagttgctactgcatcatctatatttaacaaattgtgtgacggtctctgagcagaagtggtcaggaacttctcttctgccttatatgagctaattttttagattctgaatttagcctagtgctatatacttgtatacattctctaagagttggctgcatatttactttgtacctccttgagcttttattttattcttaatcaaattttgatactgctatgtatttcattggtttaatgaatttggtcaacaattacttctgtttctcagcagtttttgctgtagtagtataaagtactttgtttacaatggcattatcaaattatgtgctcctagaaataatcaaaatgcttgcttttttttcaaaagattaagctcattggactttggctttctaacctgtaaaatggcataacaatgtccctatcaaaaggactgtgagtatatcaaataagatagctggtgtgaaaatacttgggaaagttgatgatatacacacaccatgtatgttatgattattattactaccatctttatctgttttgttcttcagctatttcattggtttctatttatagaggataagatgacgatatcctatctactaggaagggattatcttccttcttctcactttcccaatagagtaaatagttatatttaaacttaaagagtatttaaaggttttccaaaacagttcaattaaatagataaccacaaaccttcattttaaatacccttcattaggtacctatcctcattaggtactgtttgtatttgaaatttctaagaaaatttctcaataggaaagcttaactagaactattaataagaaatcatcaagtaattaaatatataacatcattctctataaagcgcagttgaattatacacatcagacagtcttcatagcattattgtgaactaggtaaggtgagaaaattaaagtttacacatggccatatgagaattcaaattaagagaaggcacagtcctttatggtggaagatatgtgtcgtgtcagattaaatgttgaaatagttattatttattctatttccttttccttccacagaaacttaatctccttggtagaaagaatgctttctaggagttggtatcaaaggaatatcttactgctccaatgtaaatatccaaggagaatggaaagctaaacatatcaacacattacttttcagcaaaatatagtgttgactcatggtctgattaaactcatcattcctacctgagtctgatcagataaagaactcttgaggcacacagcaaaatgaggtatccttgcaagtttgattttgaaataaaagcatttcatatttaaatatgaaatgctataagcttttcataaaatatatgtatatatttaatatttactaactggagtagaatgtatgaaagaaacaatctatcccaaactcagtttactacaatttaaaaaggtagaacacataactacataaatggactccactaactcactgtgagttttcctctttcttttgtcaataccaagcctgactcacctttgatgaagttgcattagatgactttcaattctgtcattcgcctatttaacattgtttattgttatctatggggctggtcagtattctactcacctttaccctgttcccttttttgatctgcatagtggcttttttaagcctttccctttcttctcaagctgccccatccctctctcctctggctattgatggctgtaccttctacttttacattcattcatctggagatggaggagtaaaatgtttagagaactcatggctaatatctcttaacattttactcctccatctctaaatttacatttcccttcttttactcttcttctccttctccttcttctcttctctcttattcttctccttctcctccttcttctttttttctttttttccagacacagtcttgtcttcctctgtcacccaggctggactgcagtggcatgatcgtagctcactgcaaccctgaactcccaggctcaaccaatcctcctacctctccagagtagctgggactaaaggcatgtgccaccatgcccagctatttttttggatttttagtaaggacaaggtctcactatgttgccaaggcaggtcttctttgtccttcctaaagaatacagttctggtatttactacttttccaaggatagcctccttactttggctcatgatcatgtttttgtcagcaactacagctccatctttaaaccctctttccccttgaatttttagtctctttctatctcctggagccttccctcagctcaagtaacctgaattcaaaaaaattccgcttgaacctaattctctgtcaggcagccttagttctttcttcctactccacccatcagccttttaaagagatgcctgcatttgctcacatttccactttcaattcactccttaacccaggggctcctaatgctattacctgaatacaacgcaccactcaactgtcattcaaaaacctagtaattatagaaggtaactgttctatttctcctggtcctctggactgttatttctgtttgctgtcccagtactttaactgttgtcttgtttcccctagccttatcatgtacaaaccaattcatcacctgttatctgtcatgttttctactctctgccctttgttcctcatcaccatgtacgtacatcaccatgtacgtactcattcatggacaaaaatcagcactctctttgattctccttctccactggctgtcccccaacatacatacatacttcacacacacacacacacacacacacacacacacacacacacacacaaccattctataagcctcttgcatctaaaccagctctttgctccactgccatcactcccttgacttaggtcttcatcatatttagcctgccttacttctgtgaatttcgacatgaaatacttccctgtagtgacttcgctatgcaatcattcaacaatagagtaatcaagatgcaataaaaacaagaatatgatcatgccaaaactcagctaaaaacctctgtggctctcaggtcccatagactgtatttgaaattttcttctctcttgccaggtttcgctattcacatcaagcagattgtcattccttagttcagccataattttccatgcctcacatttagtaaatgttgttcccttagcccggtattttctgtatctttcccttgggtggaaaactctccatctcctctctctgttcctgcagtacatgataaatgcctcaaggattgtgctcaccatattttattacaatggtctaaaatgccagacctcactgctccacagattcagagctttaaatacaccatatttgctcaagaagcattctcattatgtgtgaatgaataagtaagtgtcatgaatttcaaatctaaggaagtgagataaaaataatgtaaaaatagggccactaggaatagaaagttgtttagagatgaagaagggtagacgtcaataatacaactgctaaaatagcaaccatagtttgtaaaaatgagtgaaatataatttcatttctagaaccccatgtagacctattgcaatacaactgatgctctgttagaatggcaagaataacactagacactcaggggttccatacagactaattcttataagataaattgcagcctgttatgagtttttgagatgggtgtcatgaaaagatggtgaatgttattggacaaatgtatagaccaagagagaaagatgaagatcgattctatacagaggcagatgtgccacgaatgatagtataggtattgagtgagaataaagacctatgtagaaaaacatgcacactaccacaagaatgaaatgcactgagaaaatgagctagtgatggtacaggatctgcaaacctgcttgtcagttttcattgtttttcaagctgtactatatcttaaatgatattcaagtctgtctaatgttttctgtgcttgcctctcatgatccttaaaagttggtttaattttggcaaagtcccacaaagatttcttaaatgatctggcaaaccagtgctaacatctgtacatacattaattgaaatatattcaaaatgctatacagtctattatcacaggacttttcaatggagttgaaagcttttcaaaatattagaaaatatccatgtagttaggtagctaaaactcaggctctacataaatataagctaatgatttaagtgttagtttccattaaaaatttaattctcagttttcctataaagtattttctgggaaaataaatacatgcgtgtgtgtgtgtgtgtgtgtgtgtgtgtgtgtgtgttaatcaagagtgacagtgcactcaggttaaatctaccattcatttctagcttgtataattttattcatattctttctacattggaggagagtgatacagttgaacaaaagtcattagttttattatgtcatcagctctagatataaatttactcggttttctctctctttgcctgcccttgtacttacatatcactggcaatggaggagttccgggacatagactttggagagaggtcataatcgctgtcggatcgatacaggaaggactcccgtcgttgactgtggacaaaatttgcttggagaattagcccggatcctgggctggtcatgggatccaagggactccgtcccgcagatgtgccattgtccacatcaaaactgtaaaggaaggagaaggaattatgttgctgtgaacattcacatgttcatattttcaaaaagcatttagcgtcagctgaggaactgacagtggaattagcaggaatgaaaattacagctaatttctgccataaaaatatgataatattgaaatacataaaagaaaaacacattgacttcacattcttgttctcctggatactgttgttaactgaccagatacaagatacaggtttttccaaactctacttcagttaaaagggaaacactctgcaaaacataatcttctaagtacaaaattcctttcggaaaataacaaatacacagtaattcatcaaatatttgaattcgattcaacaaatacccattttgtgcctaatgctgttctcccaaacctgggcttctccctccacactcctaccctataacatccatccaagcattaatttctattgtacccacttccttccatccctactaccaatattttaaattcaggtctccatcaaatttcacctatattattataacaacctttatattagtgtcttgaatccattttccagtgtcattcttcagtttaaaacccttcagtaacttaccattgctctcaggatgaagtcaaaatttctttgccagactgccagtctaaccatctgctctcaattgcaattagttgcccccagcctcaacttgccatcctcagctattgggtacttcttgctcaactcatattgaggcactatctccttctcacaggccatcaccacctcacctcctgctcccctaaataatcaaatcccctttcccctgcctaactgtcactcatccttgagacttagcctgcacctgaaaggctaccctggtacatcagagctttatgaaaggccctttctctacgctcccaagacactttcccactccctaatgacagaatttacaatgaattgaaaatgtttttcacccggtctccattcctagattgtgagctctctacaaatggagactcagcgtattcttggcacattgaaaactgtgcccaagtgtcttgagtaaatgattaaatgaataaaaggcactgtgctcagcaatacatattttagagctgggaaaaaatctacacacacagttcttaacgtcatagtccttataatctagataaactttccacaaagaacctttctagtgaaacatcaaccagtattaaaataaagtcaactttcatgtgttcttaggagaggagggtgatagcttatgatagcccagcaggtgtgtggttttaaagaaaaacttgttgaaagaataaataaacatgtgaattcaagttttgctgtcattaatattttccccattagaatctttattcaaactattaactagctcattttaaaacattcctttattttctttatcggagtcattaataaatagagttatgactctaagattggaagatgtttcatggatcacttttgaatctgtgatcaaataacagtggctccgaaataatccatcaaataaacagaagagggaaaactcattatcttgagcagctgtaaatatgtttttccaacttaaaattttcttagaattgtgtctctttatagatatatttatttggttcaggaaggacaatgagagattgtcaagtcgaacagactcactttacagacgaggataccaggtcctagaaaagttaattgaccagtcactgagctaactgcattgaatcatcgattgttcctaaagtccttccagctctactgcatgattatataaaccacaaatatatgtggcacccaaacaggggacatctgtttcaccagaataggataggcacatatgtatgtgaaaccttgtcaattcccaggaaggctggaaggggaggatggtctctaatcattcaatagacatacattagggatctttggcaaactctccttggatatgcttaaataggcatttattaagcacttaatatgagtgcattaagatacaaaaataaaggatgaatgactaactcaggctgggatatctgagaagttttcatgaagagtagtatttaagaaggtttttgaaggtatttagtacacaactggaagacattaaaaacttctaaatagtgggggtttggcaaagtagatttctcttctaagaagatagtcatggcagcttttcagcatgaggaggacctagtaatgtgaatgcctgtagaaatgtttatgtttatttccctttaatatcaagatattcttattgctacactttaaaaaagaaaataccccctccttcctgtgcatgaacagaaatgtaagagatacagaagtgtgagttttggtttagtttttttcagttcaactgagtaaacaccaaatttgtataaatcagtaattttttctttaattataatttttccaattaaatcaagcaagtcttaacactccactataagttttgaaacaaatattgctaaataccttaagtcatttagatagttatgatatttttaaatcttacaacttttaagccataatattagcactaaaaccaaaacatttattaataggtcaggaagtgcttgatatgagatattctaggggctttaatatttttctttgtatactgtaatataaaaatttgtccactagatggagatcattttcttaaacaaggaaactattttctactgaagggttaaataaccttaaaggcctaaattatttcttaggaactcatgaaaataaccctttaaatgacatccaaaaaacaaagttcacaatgtatactaagtaattatcaatattgataaaattacattaatctaatattagtattagctttacaaacattgagaatgaagatctaaaaatagtgactgatattttattggactttttcttaaatgatgagttcatgtcctttgtagggacatggatgaaattggaaatcatcattctcagtaaactatcgcaagaacaaaaaaccaaacaccgcatattctcactcataggtgggaattgaacaatgagatcacatggacacaggaaggggaatatcacactctggggactgttgtggggtggggggaggggggagggatagcactgggagatatacctaatgctagatgacgagttagtgggtgcagtgcaccagcatggcacatgtatacatatgtatctaacctgcacaatgtgcacatgtaccctaaaacttaaagtataattaaaaaaaaaaaagaaaagaaaaaaaatacttgagaagacttaattgaatttccgtaacaaatcactgagtacttattgtgttggagtaaagtaacttgagcatcattaatagtctggggtttcactctaaattttggcaccacaagtattctcagaatacggtttgttctgggaagtgaacctagggtctgagttcatttgcataatttatttccatgatattaaatcctcttataatcaaaattaattatcaagaaaaagtaatattaccgagaatctccagtctgaagtatcagccaatgtcagtattagtgaatgactttatacaaagagagactttgtattttgaaatagtcattgaataaacttttacattacatcctatgtccttagatcagcacttgaataagtacagatatactacacattgtccttttctagaaagcactaaagtctagttaaggtaatagaacatcaagcaaccagagaaaataaaagcagcaaaacaggtggcatctgtattaaatagcatataaatactaaaacacgaaattgtattatataggcaatcagactatgtgatgtagacaatgaatgtaaagggaatttaagaagttgcaggatgtacacctttgaaggagagttaaaaaatgtccagccagagtagagctggggttgggggtggaggccatccagcaaaagtgaagccacaaaaacaaaaccaagaaggaatgaataaggcgtgtatataaaacaggacatttagtgtctggctaaatttgaggcttggtattaaagaatagtggggacctataaaaatggcaattttgtacagttcaacctaataggtagggatggatgtgtttatggaaagctgggccaaggagtgtcagcagaagcttgttataaagacttacgtggaaacacacaaatcaacttttaacattgaaatctcaggggagtaagatgaggaagaccagtatttgttaaaataaacatgttgcttttgcaacaaataaaaggtagaaaacagagtagaggctgagcacagtagctcatgcctgtaatcccgacactttagaggcacacgtgggaggatcgcttcagaccaggagttcaaggttacagtgactgatcgtgtcactgcactccaatctaggcgacagagcatgactctgtctcaaaaaaaaaaaaaaaaaaaaaaaaagaaagacaaaaaacagagttaaaaaaaaaaaggagaaaaataaatgttttaactacaagaggacccccaaaaaggcttgttcattaaatacttcaaatattagaactagggggtttgccttgagtagggaggttagttgtggattttaaaaggcagcacatttttactcagtaggtagtaagttaactgagaattagacacttacttaactttctgaaagttagcctaattagtcagtttgggctgaaattatagatggcttcaaataagctagttatctttgaaacataattttatcaatagtccacatcgtggtgttatgaataaaacaagaaggtgatgaaggataaggtagccctaaccttagatgctggtatcaaaatgatcagttgtgaattttccaaagacattctttagaaaacacttggatgtggtgaattctcttttgactcacagccaattagatggagcccaagcaaaaaactagaagtttgaaaaagtaactaaaggattggggagagtaaaaattaccaagtttaatgatgatggtggcaataataataatgttaataacaataaaacttctggagcactttccatgttccaggcgctgtgctttgcatatattatctcatttaatcctcacaataacactttgaagtaggcactgtattttccattcgaccatggggactctgaggcatagacaagtgactctatgttcagtagtatgctcaagctcataagtgggttttaaactcaagctgtctgattctaaggctggggagaatggactctgtttacacctctattatgaagtttcatttaaaaaaatacaagaataccttttagcttcctcacctgcagggaacttttgaaagtaacattctgattaacttacaggtgacgcatgcaaaggctaattctgagactaaattttcgtatggggctgggtgtggtggctcatgcctataatcccagcactttaggaagccaaggctggtgaactgcttgagcccaggagttcagggccagcctgggcaacatggtgaaacaccatctttacaaaaaattttaaaattacctgggtgtggtggtgcttatctgtagtcccagctaccccagaggtggaggcaggaggatcacctgaactaaggaggtcgaggctgaagtgagccatgattacgtcactgcactccagcttgggcgacagagcgagactctgtctcaaaaaaaaaagttttcatatgacccaacattttggaatttgccaaatccccagctttttccaattctgaacataacagtagggtgtaaaaaagtctttgctgtaacccatttggcgggtttctttatagcatttgagatttcatttggaattaaggaagggtcagtgggtctgcaaaagggcttagcaaatggaactaagtgaggtgctttcttgttccatatgtttgcttcccttaatgcaatttaagaatgcacacaattcttaaaagagataacttttgccagaaggcagttttggaggaggaatgatatagctatatttggtctcccatgagggggcagtaacagtaatgaccagctggcctgctgcattcagaagtgttaaagaatgtgtgtggctagcactactcatgaccatttactccacagacccatccttttctatggaaccagccccctacaagaaacaaagagaagtcggacaaactgacgaatgaactaattactcccagttctccacactgttccatttcagtggaattactggatggtaatacagttccaatctacctttcatccacgctctcaactgctcgcatactttgtgtctactgaccttgtaattgtttgtctgctgaaggtcatttctcatctttttggccttttgctagacactgcttccctagtttaaacttttcccaatttatttttgaccatgatatgggccctctcctgagccagagtcctgctactgtgctgagtaaatagctttcctcatctatcctagccatcaggaccttatacttagcactgacccccagtatgaagcccaaagtgggtggggcaatgagggcctcagtggagcagctgctaaggaacctctatcaatagcagcctccattaccgaagcatctatgaaggccactcacagggaagatcttgctgaatgtcgctgggaatcctgggagccatcactgaagccaggaccatctgaaagctgcctttttcactacatagtaagaacaatggcacatagaaaatattgacctaccaaaaatgttcctgttaagatgtttatttaagagttagaaaacacaggttaaatttgaaatcttggttcagccacttcctatttgggtgctctagggcaagttgctgtattttctaggctttcactgctgataaagataattacaatacctagctctagggccattataaggattagaagagaaaatgtttggaaagcattcaccacattgcctggcagctagtacactcccattatttagcagctattgtttttcatttttattactctttttctcccagggagatcttcatctaggtcattctctttaactttatttgaacacatggctttgggaagaacctaaagggagagatgaaagaggaagagaactgagggccaaatcacctgaatcagcccttgcaatcaatgaggtgacagatgctggagccagattgctctaaaagtttcagctgcttttatgtctccacccaactccataattccagtgtgataacatctggggagggtggagactgctgatttttttctagatattactcactgaggagaaagaataatttcctaccaggaagtgtggaaggcttggaggtcccaacaacctaggtggggctccagctgaatataatgagcagaaacagtccttcagacctcaggtctccagacacagggtgtagcttggggacctcaggtcacaattatactgatgtttatattcctgtactccactctcccctgtgtattgtagctcatgctgttagccaacacattggaactcattttgatgctttgccctcaaggggaggggaggcttacccttgagcttaaggggagagtaactgtaactggatgactacatacatttttccctctttataatactaaatattttacccattgttatcaatatcacaaggttatgaagctcgtttctaatcaatgccactgatacttctctattgaaaatttccctgcaggtcaaatagcttctctgaagtaaacaaaataatgatttgcaaaattcaccattttaatatttacttttctctgattatctatggagatgagactgtagaaactagcattttacagtgatatgcacagatggcaatctttcccaatcaatcataaaactgcatattaaatttaagtaggatacccggagaaggcatgatatttagctactttacaagattacacagctaaattatactacacatgttagcttgtataatatatatatttgcacagagttaagatatttaacagacacgttttaccctttgttttcacagatgatttttataaacaaaagcccagggctgggcatggtggctcacacttgtaatcccagaactttgggaggctaaggggagtggattgcttgagctcaggagttcaagaccagcctgggcaacatgatgaaaccctgtttctacaaaaaaaaaaaaaaaaaaaaaaaaaagtcaggcacgatgatggcacaagcctgtggtgctgaggcaggagaatcacttgagcccaggaggctgaggcttcagtgagtctaaatcatgccactgcgctccagtctgggtaacacagtgagatcctgtcatacacacacacatacacacacacacacacacacacacacacacacacactggtacaaagatgaagggtatatgcttacttatgagtaaaacattaggtggtactggaaatatacaacatatgtttctggcttgtcagtgacactcccaagtaacacagggcaataaagagattcaagatggaaatgatagcatgagtttgatgtctggactataaatgaaagaggataagctggacttgcttagcacacttttgacacaatgatatgataaaaggccaatttttctgaaaagtatttattaggccagtgttatggactgaatcttgtttcccctataattcatatgttgaagccttaatcaccaatggttacatgaggttgaggttgaggttaaatctatcttgtttcccctagaattcatatgttaaacgaggccatatggatgaggccctaatccaatagtgctggtgttcttataagaacagagagagacacaagagcattctctcttcaccatgtgaggacagagtgagaaagcagccatctgtatgtaggaagagagccctcaacaggaaccaaatcagccaatcttggtcttggacttctcagcatccagaattgtgagaacatttctgtttaggccaccagtctagggtactttgttatgcggcctgagttgactaaggcaaccagaaagccccaaccaaaaattgttttacttgaagtttatacattactttttaatgactgttaagaaaaattttcttaactgaaactctctctaagaaagcatctcaaattattgccaagaccaatgccatgaaattttccccctaaattttcttctaggtttacagcttcaggtgttataattaagtcttgagtggattttttgtgtatgatttaagataaaggtttagtttcattcttttgcatgtgaatatctagtttccccaataccattttccaataccattcaagacttttcttcattgtatattctggacatccttgtcaaagatcagttgactgtgtatgtgtgagtttatttcttggctctattctgttctattggttttatgtctgtctttatgccagtaccacattgttttgattactgtcacttagtaatatgttttgaaatcaggaagtgtgagatctccagatattttgttctttttcaagattgttttgactattcagccttttgtggtttcttatgaagactgcttttctatttctataaaaaataccattgggattttgatggagattacattggacattgtggacattttaacaatattaagtttcctaatccacagcagcatcaaagcataagcaaaaaaagcaaaaataggcaagtgggactacatcaaaataaaatgtttctgcacagcaagggagaaaacacagtgaaaatacaacctacagattaggagaaaacatttgcaaaccatatatctgatatggtattaatatctacaatacataggagctcctacaactcaatagcaaaacccccccaaaacccaattgaaacccctcaaaattaaaaaaacccaatgaaagaaatggacgtttctccaaagaagacaaaaaatggcaaacagggatatgaaaagatgctcaacctcactaatcattaaggaaatgcaaaggaaaaccacaatgagatattgcttcactcctgttaggatggccattattaaaaaaaaaaacctgttggcaaggacatacagaaattggaatccttatgtactgatggtgggactgtaaagtgatgccactactataaaaaacagtatggaagttcctcaaaaaattaaaaacagaactaccatatgatctaccaattcaacttctgggtatttatccaaaaaattgagatcagcatgtcaaagagatatttatattcccatattcatttatgtatattcacaataccaagatgtggaaacaatctaaatatccatcaatgaacgaatggattaaaaaatgtggtatatacatacaatggaatattatttagccttaaaagaaggatatcctgtcatatgctacaacatggatgaattttgaggacattatgccaagtgaaataagtcagtcacagaaagataaatattgcatgatccctcttatatgagggatttaaagtagttgaactcatagaagcaggaagtagcatggtggttgctgggcctgggtggagggagaaatggagagttgttgttcaatgtgtatcatttaatcatgcaagatgaataaattctagagatatgctgtacaacattgtgctaacagctaataataatgtactatacacttaaaatgtaagagggtagatctcatattatgtgtctttgtttttagcacaataaagcaactttttcaaaaaggatctcaaatggccctaacatgaggccatggtatttggactcttgaggcaaagcctgcagtagcagtatgaggtccatatttgcagtaattacctagaaatcatgagaacttcaagtagtaaacatatacattcaatcagaatacgtgctgacaatgggaagcggaaagtgtctttttttttggtagtcattgggaggccttaatttctctggcaatttcatgcaggtgtcactgtgattgagaataaaacaagtagagatttatttcttcccttacatcctattatcatgtgctgaccactaactaagagtatggagggaagagcagaaaagcacatgctctccaggccaggctggacctgagagtcagctgtagtcccacaggaataactcagttttattttccttgtactgctcacagcaggttactaccaatctttcactttctaagatcacttctaagatgctatatttccaaaatgcactctttctcaaaatgtggcttcatcaagctaaagtccaaagaggaatagcgtcttgttaacaaagtggggctcaagatggattaaagacctaaatgtaaaagctaaaggtataaaaaccctggaagataaccaaataaataccactttgaacataggaactggcaaagatttcatgataaaaatgccaaaagcaattgcaacaaaagcaaaaattgacaaatggaacttaattaaactaaagagcttctgcacaggaaaaaaaaacacaactattaacagagagtaaacagataacctacagaatgggagaaaatgtttgtaaattgtattacctgacaaaagtctaatacccagaatctacaacgaaattaaacgaacattcaagcaaaaaccaaaccgccccattaaaaagtgggcaaaggacatgaacatttttcaaaagaaggcatacatatggccaataagtgtatgaaaaaatgctcaatatcactaatcattaaagaaatacaaatcaaaaccacagtgagataccatttcataccagtcagaatggctattactaaaaagtcaaaaaataacagatgctggcaaggttgcagagaaaaggaaacgcttatatactactggttagaatgtaaattattaatagttcaaccattgtggaaagcagtgtggtgattcctgaaagaactaaaaacagaactaccattcaactcagcaatcaaactacagggtatataccaaaaggaatataaatcattctaccataaagatacgtgcatgcatgtgttaattacagccctattcacaatcacaaagacatggaatcaaactaaatgtccatgaatgatagattggataaagaaaaatctggtacatatataccatggaaaactatgcagccataaaaaggaatgagatcatgttctttgtaggaacatggatggagctacaggctattatttttagcaaactaatgcaggaaaagaaaaccaaatactgcatgttttcacttataagtggtaaccaaataatgagaacacacagacagaaagagaggaacaatagacactggggccaacttgaggatggagggtgggaggagagaagaggatcagaaaaaaaatactaactgtcaggtactatgcttagcacctgggtgacaaaataatatgtataccaaacccccggggtcacaagtttacctatataacaaacctgcacatgtaaccctaaacctaaaataaaagttaaaatattaacaacaacaacaaaaaaaaaaaacaagcaagcaaagaaaaatacccaaggtagtgttgcggggtgtttctgtctttatttattgtttctatgacatagagcaagtaaaattgatttaataagccgactttgaaacattgatattttaatgatgtgccctgctacttctccagccacccacccacatttattctttatattgcagacagagcgatcctcctaaaatgtaagcccattctcggcaagttcctactcattatcccataatggtgtcctattttattcagagaaaatactacgttctcccaatggtttaaggccctcagtgacctggtccctggtgcctctctaatctcatctttacctacatctctccctcttgttcactctgctcagcctcttggtccctagctgtccttgaagcactgtgcatactccctccccagggcctttggatttgcagttctctttgcctggcatattctttctagagatatcagctcaatgttaccttcatgagatattcccatactggcctatttaaaactggcacccctaacctcctaaccttttttttttttgaacaaacaaacaaaaaaccttccttactcttaatttttctccatcgcatttaacagcttctgatgaactttgttttttacttattttatcatcttactcaccccattagaatataagctccacaagtgcagagatttttttttaaaaatctactttgttcgttaatgtgtcccccagcaggtacaacagtgcctcacacgtacgagttgctcaataaatatttgtatcgtgaatacatgggtatctttagacgcagcggtactttttctataccggttatcatttaccatggttatctgtgtagttctactttaaataaacttcataactattttttaatttagctaggagttggtcacttatttaaagaaataggttaatgagattgattagcacatttgaagaaataatctggaacatctctaagaaggcattttaacgggggttattttgaatatccttctgtttgaacagcagtcagccatgcaatcaggggtgggatcaaggttttgtggtacacgaagattatacaattataagggtctgctttcagaaaaataatacaaaaaaatcttagttttttgaattttacaaaacctaaaactacgtgcagctgctagtaccacttcttacaacttgaaagggaaccaggccagtgagaagctcttagcttgatcttcattagtttcacctcagatctgcatctgaggtaattacatatcaggaaagaataagaaaagaaactggatgggtgaaaataaaaatttagcaccttatatcattacttaattaattatgtgttttctgagatggagttttgctcttgttgtgcaggctggagtgcaatggtgcgatctcggctcactgcaacctccgcctcccgcgttcaagtgattctcctgcctcaggcccccgagtagctgggattacaggcaggcgccaccatgcctggctaattttgtatttggggtttctccatgttggtcaggctggtctcgaactcccgacctcaggcgatccgcctgcctcggcctcccaaagtgctgggattataggcgtgagccaccgtacccagctgcaccttctattttcttaagagataaattgttattagttttttcttcattcctttttattctttccctccctccctatcacctccctctctccctccctctctattttcagtacccaaattttcaaagcttactcataattctcaaaatttctcttgttagttgcacgtgtttatttttcccagatcagtgagtgtcacctagtcctggggaatggggagtgattccattaggtcagatattgaactcactttgaagaggggtgatcttcaaaccatacctgtctctcaagatattacaattttctttttgagggatgggttttaaaaatgtgatcctcaatcacattcctggctatttgggtatttaggcttactaaaaattaatctccaaaagattttattgactaaataagaatgattgaatgataaatcctttgtagaaatacttagccttaaaatattatgtgttaagtatgttaaataagtctaggtaagattataacagaaaacaaaaaagtaatagttctactataattgcctttaaaatataaccgaattctgattcttttagactaatggatacgaaaactcatataccatgtttttcctctgggtttgcactctgcatcaaacaggtcaggaaaccattcaccagccctactattaaatctattttggagaagtgatattattcagtttccaacctcaacaatccaaacagatgggttttctgccttaatggggcttgaatgaatggcgaagggcttcagagggttgtgtggcctgaattacagacaattttttcaatcttactgggcaaagcaatgataagaatattatcttacgatggccataaacaatcacttgcctcttcaattcttttaaaatatatagtggagaataaaaaaagatatgtctcattatgtgtctcattgtataataagtacactgagattagctttctctcatgatttcttatattgggtgaattatgtatggttacaaattatcttttaaaagttttaagatgttggatgggctaccacagaggtagcaggatctacttcaacaatgattttatagagtgaagaaacattttcatgtttccttgaaatggaatctggctgaagacaaaatgaccttgggaaagcatagaagtcaataatcaggactgtgagtataggaaattctgcttgttgtctgccatattccattctctgcctgttcctgggcataaaagaagttctcgttcccttgcaattagatttggccaagtgactagatgtgagcagaaatattgcatgccactttcaggactggctcatagctcctcccacatgcctatcttgatgttctttttctgccagctggatgctaaagatgctgatgcgtgaaggatggtagaaacagaaggtgggagaatcctggtccgtgactgagagcaaggagagctgccacatcctcctaaacaccatcctagaacgctacttgatgaagaatgagtttattttttaagtcatttaatttgggggcttatttgtcagcacaataacattcaacacagtgcgttccatcaaagtaaactggaaagtacgtactgaaagtacattagactttcaaatgtctcacattcaatctatctctggcccaagtgaaaccatctatgtctttacttctaccaccttcacacttcatttaggttttttgttttgttcccttgatcttcctcggttaacagatattttcattatgacatttctcattacctaagtgcttaagagatgttagagaataagtctataatcattacacacagttgtgattgttgtgtaaagtgaaagccagtctggttctgttctgtcttaacaacaatcagcaaagttacagaggatcagctcaagtgtgaacctgacacatgaatttgtctctggattacagaagacacacagaaccgagattaacaaacactcaggatttacacccgtgcttcacttgagccaatgagatttcagaagtaccagatcgaaataggcttcccttaagacgtcaaagcattgcaacaaaaacaaaaacaggcaaatgggactatattaaaaccaaaaatctctacatagcaaagaaaataatcaacagagtgaaaagacaacatgttaaatgggagaaaatatttgcaaaatatatatctgacaacggactaatatccagaatatgccaagaactcaagttaacagcaaaaacaaaaccaaaccaaacccaaataatcccatcaaaaagtggacaaaggacatgaagacatttctcaaaagaagatgtaaaatgaccaacaggtatgtaaaaagtactcaacattactaatcatcagggaactataaatcaaaaccacagtgaggtatcttaccttagaatggctattattaaaagaccaaaaaaaaaaaaaatagatgctggtgaggaagtggagaaaagggaattcttagttggtgggaatataaattaatatggccattatggaaaacagcatagagatttcccagaaaactaaaagtagaactattatacaatccagcaatccccctactgggtgtttatctaaaggaaaggaaaggaaatctgtatatcaaagggatacctgaacccctatgtttattgcagtactatctacaatagctaagatatggaatcaaccaaagtatccaccaacaaacaaaccgatagagaaaatacatatatatatatatatacacacacacatacacatacaatggaatactatgcagtcataaaaagagcaaaatcctgccatttgcagcaacatgaattgacctgaatgttaagtgaaataagccaggcatagaaacacaaatatggcatgttctcactcataagtgggtgctaaaaaaagttgatatcatgaaggtaatagaatgatagctaccaggaggaggggaatgaagagaggttggctaacgtatgcaaacatacagctggatagaagaaataagttacaatgtgtgatagcagaatagggagattatagttaagaataatgtatcatatatttcaaaatagccagaagaaagaaattgaaattattccactacatagaaatgataaatgcccaaggtgctggataccctaaataatttgtctcggtcattatacatcctatttatgtaacaaaatatcccattatcctatgtacaaatattgtgaattaattattttaaaattctgttaaaaaacaaaaattaggcttgccttattcaaaatgttattctgaagcaaaatgacattttgaatgtgcacacttctggggaaatggttcagagtctatagaaaaattctagaaatatttcacaatttatccaaacccagactagaaccactcttcactgttgcctagctcatttgcagtgggatcaggatgagttggttcagactggcaatgtcgtaggttgaatcagatgcctaagaccattcctgttctgaactcataggctaaatgcctttctagagccaaatgttcctctctagaagaaggaaaggatattacctggggcatcctcttgccagtatagcactctcctcaaatttgagccctctttctctgagtttcagtgtatttctggtgtaagaaatatttcattgccaccttagagatcaaactcaaaggattaatagatcctgagggtgatagagtaggtcatagaaaagagatacctatccattccacaaatgctcatcaactacctactctagccactctgggaggaataatgaagctcattgagaagacgtaaggatggtagtagttacactgatcttctgctccaaaattaatttggggttttccttcccctcaggatgaccaaattcatggtgaggctattcataaatcctgttgacttgccaggtccacagccaagataaatgcacagctgttttctaaaggcatttgacctcttctctaatcacctcaagttgagaagcaatgttcattgctgactttctttgttttgacattaactatgttctcaaataaaaaatcaagttttacttctccagccattaaaatttctctcatttttatgaagtaatatttctcaaacatttgaatatattcatccatttttgtgccacttcatctattttctagatagattatgatattcaattatgtgtattttgtctttcttttttctttttttgtagaatttattcgatataatcttggctcccattttatttcccacttatcctcttttaaaaaatgacttatgcttttttaatgaggagtccaaaatggcacacagaactctaagtacagtgtaaacaaggccatctgtaatgagaaagccattcaattcagcaaagatttttctaaccagctatacatagtcatgacagaatcctcagatttagtgtttcctagtagcaattgtaattcttttgattgctggcctgtaaaatacttagtactatactgtaccatgacagtggaaatatgtaaatagaacctccatctccagcctgcttatataaaatgaataccactggtaaataatttaatgttaaatgtagttacttttacagaaaaatatatgctgtaaaataacttctactcttttttcatacattcagatagcctaaaaaaaggatagatgtcagttttttaaacttgggggaaaaaagaacccaaacatgattatatactttgctgacctttgaaatttaatttgaccaaattttgaaaatagtctttgagaattacagagtgagcaaatgccagtacttcatgaaactcaaatcgagtttttttttaaataagcagtgtaggtatcgtctttgctttttccatgtctttaagacttttaaaaatcttaaaatatgactgtttcaccactctttttctttttttatagaattcagaacttaagttaaatttgacaagaggaaaaataaaatccaaaccacatctatgcttattctgctcttggcttcttcctacagagctgtcctttaaatttgcaatgtaattatgagtttccataccacatatgccactaatcccacgaaagtatgtggcccttcagaccacatgaaaaaaatctctcagggcaccttgggtgctttacccacttgccatgtccaaaaagagttccatctgtgcccctgatggtcagataacctgtcctgggtgagacaaaagaattattcccaaaggccttttcctcctgtgcttcttatgccctcacaagcaggttgtttctgagcaccttcacaggcattgttcagtggaattcacacagtgaccctgggcaataagtgatgggattgggagtgtagatttttatccttatttgctgaagaaaaatctgaggctcaggaaggagggcaatgatgtgcctagagtctcatagatttaaatggctggattacgactcaatcccaaatcttctgttctttggactaaagatttaaatgaaggattgaacaattggattacttttaatccttcataaagcttgaatgaaagacaaatgcttattttaatgtctcttatgagcactcactagaaatattctctagccgagcacaatgttcaaaacctttgtgtggaatgttacattttgctgaaatgaatggatgtgcttacatgtctgtaaatagtagaatgaaaaagctggaaaaggattttagcaagagtccttcattttggtactcttgttaatcatcctaacaatattgtaatgctttatagtgtatggtaaatgtttgttaatacttagagggagatacagaaaacaactatctggttaaatttacttaaacatatcagaccagctttgcaaaacaaagggattcccacttgatattctgaagaatatttcagaaaaatatgaatgtatttcttttgtattatttattgatttttaaattttagatccaggggtccatgcacagttttgttacatggctatattgcaggaagctgaggtttgggcttctaattatcttgtcacccaagtagagaacataggacctgatagctattttttgacccttgccaccctctcttcctccctgcttttgcaatccactgttgatgggcaggaatgtatttataacgcaaagataagaactgatgctgggcaatactactgggttgagaattgggagccttgagtttgagttctgaccccgctactacctcgttgtgattttggcaagcctcttgacttctctgggacttagctatttcatcaatgaagtaaagagattgtccttttcaattactgctacatatcactttggagaggcttttaaaaatacagattcttaggcctccttttggatactctgagtcggtaaagctgaagctggatccaggaatctctattttcaaaaggctgtcatagctatttgatgtgttgtcaggttgagaacaccggacttgctgaccttctagctttaacattcccaattccaactggacagcactgaactcagctcatattcctctatgctgtgcttactcgggagcgggagtggtgagaagagccaaagctgtcgtcaccaggctatattacaccaccttccttggtggtgtccctgcccacatgcccagctcttcaacaccactttctacgctgctgttgggattttgtgtgtggttaaacgggatggagaaagaagggaaaaaaggagagagggagagaaggaaggaaggaaagaaaggcaggaagaaaggaagaaggaatgaaggaagaaaaggaaggaaaaagagatagcttgcagtggctagaaaatgtaattattttacttccttgaataactacttttgcctataaaagtggattctttatcacggcacttaggttactttaaaatcttgtcctaattcccttcaaatcttgtctctagcccctccaaagatacttctggtcatactgttctcactctctggagtatgtgttacagataatgaagttttagacccaaccaatttctgcctcatgaaatcattctcacttttcaaagctcaacatgtagtaagaaatgtgtaatatgacctccagttcttccttccacaattccaaacatcttattcacactgtcaataaagcattatctcagggttaaaataataaagcaactggctttaaacacatttctccccttatcaactaccccttcccagctatttgaggttgggggtctccataccatttactttaatcatcataaaattaacattcatgttttgcttgaccatttgccaatttctttacatccattattttatttgcatttcataacatttctgttaaataaattttttgtcaacccattttattgataatgaaactgcaaacagggaggtttactggtttgctggttaatgatgaagctgagatatgaacctagatgctgtgatttcaaatcttatgattttcctgcactgatttacaagacatcgacaggtgctcagcaaatgcatattaagtgattaatattaagtgaatgaataactggtgagaaaaggcctcatggtctcaaataatggtctctggtctatgcttgcatcttgaatctgcttcttgctatctgaacaatgtcagacaatatatctaatctgtctgagcttccctttccttctttatcacatggggaaatcatactgccctcatataggtgtgtgtgtgtgtgtgtgtgtgtgtgtgtgtgtgtgtgaactcagtgatatgaaatgtgtaacgtgtcctcaccagtgtgtgcacagagtaagtcctcattatatgtttgcttcttaattttgtgggaggcagtcattttgttattcattgcatctgaattttatgcataagcctacctgtggaggttacatttattcctgagattttaatcctctctcatcttcagtgagaaacagtaagagagacactatatgatgatagttaagaacacagggtctaggcagccctgagttcaaaacctgattctctgcctttgtagccttgtgagtttggccaagttactcactctctccatgcctcagtctcttcttccataacatggagaacatgccatttagaattatgcctggtgtgtgataagtgccatgtatttggggctattacttatgttatgggggcacaaaactaataataggcatggttagcacaataatgagatatttgtcctttgtgtttctcaaccaaaattgatgactcttgtaatataggatcaacagtaaactgggaccttgtcatttgcatttggaatagtaggtaacagtaattagatgagcatttgaagaatacatgagaactcacatataggaaaacaaagtaggagtgtgcattttgtatttaaacataatgaagcatcagctcttatgtatttatgaatggagaaggaaaaaaggtcattcgacttttgttgagcaccgtggattactatctttgatgctgtcatttgaaataacaaaaactgcctctgcctttccccagccctactattgaacagaaagaactggaaggagaaagagtgccatcttttagaaatggttcctctgagtcatagttatcccttttgagtaccacatcaaaggctctatttcacctgagaaatctcatacgcatttcaaaagtcaaactgtaataacaaaacctacactacctataatgtcaaaacatcaagcaagatgtaacaatctctctcatatcctagtctcatacatattggtgtgagttaaggacaaaggtacttttgactttaagacagtaagaaatgtgaggtcagtgtccttgggaataactagaaaccagagatatttattgcctagagacaacgttaagatgatctcagaaaggttttctttggaatggtggagattaagtggcaaggccaggtattcttgttaccaaaataaatactgcttaagcaacagcaaacatgggagagggatgacagaagaagggtttctctatccctttgctggagctaaagtaaaacaggcaaatgattttgaaggctcagcatttaaatctaccatatagggtttaactattggtgctgtactgctgtctgttgatagaactatgccttctcctgaagcttcaaactttagttgatatctcaggtagaaagtgtgttcttcaacatctttcatagctttggcaacactgatcacgttgctgaaatgcctcctcaccggagatcttaccacctgtgaaattctcctcaaccctgctctctgcctctgaattcctggacagaattagagctgatatacaagaactcccaaaggcaagcctgcccagacagtttttaggttggtagttcactgtccaggggacccagctgccactattctacaggcctttttccaagggtaacacaataatcacaatagataataacaacagagaatgtactatttttagcatttcatatccattgtctcatttgatttttattactatgccggataaagcaatggtgctaagagaagtaacttgcctgaaatttgtatttttatccattataattcgttgcctctctaggatccaatggccccttagtaaaaaatactgatgctttaactctaggttcccaaatgccatttagctccccaagcatcgtactgtggcaaaaactacatgcactttgaaatcagatctgaatttgaataggttctgttacttgccagctaggggaccttaagcaaagcttcttaccctctctgagcctgcaacactcaaaaaggattacaaagcactcacatattaaaatgagttaatgaatgtgaaagcacctagaacagagttttgaaaatagtacatgctccgtaaatatgaaattcctttttcttctttcccctttgaatacatgggagtttcctatacaatgctttggtattttaataagatggtcttaattttactcattgcatgcatcttgaggccagtgaagcactaacgcaattatctctgtcaagccttccagttattaaaactaacagccatgacacaaccttctcagttcaggcagcccacctatatttttaatgggagtattggtatatttacagtctccatcagaacaaagttctgttattattttgactctaggaccattattttatgtgacagtgactttgtcagaggagagaaaggatgtgactttaaccctggtttttaaaaaagagcaattttcctattataaactagttaaaaactcttgttgaatagcatattgcaattgatgtttggggtaatatgccagttttagcaagaaataacacgaaatagaatgctccaaatttattatttatttgcacctgtgctcacccacttattttccttcagccttcatagttcttcagatatttgatgagtggtgtaggtgatgaatgaatggcacatgtctgtaaaacactaagctcagctcaagacctgcagatcttcctagtgaactaaccaagtggttcagttgataacacaagtatagtatcccaataggtttagaccctgctctggactctggagaacattgtatctgtttatgtcattctaaaacatagccaccctgttgcaaagagtttcaaattttggagaccagagacccctttgagaacgacatgacttataaatctttggaaatgtgagtcttcggaaaaattcacaaacacacacacacacacacacacacacacatcccttttggatgtaattccataaagttcagtatagcctagtgattaagctaagggctttggagttagataacctggcctaaaataatgaccctactgctatttagttttgtgaccttcttcaagtcatttagtctctttaaatttcattttaaaaatgggaatgaaaacagtacctatgtgatgagtctttatgagatttaaaggagataaagcatgtgaagtgctcagcacactgtatgacacttactaaatgctttgtacatttttgttattttaagggagttacagatctccaaagcttatttgtgggcagcagattaagaatttctgctatgaaaagaggacaaagttcaaaccaattaaggaccatctgcctaccataaaaacaagatcctattgaagttaaataactatcaataaaagggcattcaacaactaggtctgctaccctgcctggccctgagcaagtaggacaatgggtccagccatgtccctgttctttctgaggagtggcaactgtgcctcctactgcacccgcctgtaccagccatggctgagaacttggcagtcatggatgctctctacacttgactgaaaaagaaaacagcttcttggctgtctgagccttaaaaggtgattgtcctattcctgacatattctttacaaagttctaggtgtaagaaaaggctgtttcaggttttaatgagagaatatttgttagagagaatatttgttaagcgcccagcttaaggacacacacaaaactatcaacaaatgccatctctttccaaaggtcaagagagagggtaactttacttgacgaagtcacagctctgggagaaattccactgacactcaggggactaagttatgtagtttaactaaatttgacttgaaataagtaggcatttaagagggcttttctctggggattttacacatattttgctgatgttgtattttaaggtatcctattttggtcaaagtagattctttagccaaatcagtacattttgaaatgactaaaatatctagcagccagcaagttcagatacactgatctttaggaggaaatagccacaaattgaatagtacttaaagaattctgtatcattttgctttgtttcagaaagattatcacagggaaaagcttagttaagtgactttaatattaatatattcatttctgtatttccaatatctagcataattctcacaccaggtataggaaagtgataactatttattgaatgaattttctatatatgtatgtcaatatccatttttaagaactccatggtcaggcatggtggcccacacatgtagtcccagctactcaagaagctgacattggaggatcacttgagcccaggagtttgagtctgtagtgtgctatgatcagacctatgaataaactaggtgaggggaaatttactgtgcaaatacctgctatggctgatacaaggtgcagattatagctctatggtggcctggagaacctcacacttcttaatgggttctctaagcaggtgaccaggagaatcactattctatttttgataaagtttcactgatcttttttcaactagtcttaccaaattctctgagcaacacctgctgcatttgatctcaactcaatttcaactccactggggtgcatgggtgggaacaagagaaaaataagggaaatatttaagtaaatgaaatttagcaatgtcagaagagacagcaggacaaattgcaatcaataatccaccagcaatgctaatcacttaaaattgtacatttacattttccaatgcaggaataatgatatcaatatgaataccaatgacaacagtaacgataatgagttcacatttattgagtatttactgtgtgctgtagactgtgttaaatcatttgcatggcttatttcatttaatctcacaagaatcccaggtggaagagactggcatttcctttcctcctttatagataaggaaactgaggcagagaggagttaaataaattatggacagatgtagagccagtgtcagagcatcaacataagaattctccatcgttatactggcttttctcacaatatggccttagaattacctgggatgcttgctaaaaatgattagctctcagtgttatctaaagcaaatgaatcagggtcttagggatgaagatcaggactctacatttaagagacagcaggcacagtatttcttacgtacatcacagttggagaaccagtgtctgagcagtatgaatttcacagcctgatactgctacatgaaccagattgagtaaaatgattctcgtttttactatagagtcgtataagagagaaaatatatcacaacattaaagagaaacagtaaaatcacctcaactattgaaatcatttcaacagaggactcaacttctgaattgatcatagagatataactgcttttgaccagctttagaaggcagatttttgtatttgtctctcatatggaactggggcctcaatttcccatttgtaaaacaagagtgtcggactagacaaaattttataaaactgcaggtttaaatattaataaatatataaatgttttcccttttttaaaaaagagaattcactatacaatttcttaaaataaccttttttttttttttttttttttttttttgagacggagtttctctcttgttgcccaggctggagtgcagtggagtgatcttggctcactgcaacctctgcttcccaggttcaagtgattctcctgcctcagtctcctgagtagctgggattacaggtgcccaccgccatgcccagctgatttttgtatttttagtagagatggggtttctccatattggccaggctggtctcgaactcctgacctcaggtgatctgcctgcctcagcctcccaaagtgctggaattacaggcgtgagccaccggaactgtttttttatatgtaggcttaaaatttgttgtaaaaactatctggaagtatatttagtatgtcttgacaagtttagacaccatttaaactctttgacccagtaatagcatttccaaaaattttgccaaagtaattaaccagagatacagattaacatttcttctacaaagatgcttagtgaaccactacaataaagaaaaaagaggaaaatttaaaatgcccaacaatgaaagaatggctaaatattgaataaatcattttattacatgtaaaatggattcctatgtcaccattagaatatcagatttttctagaatcctaaatgacacgagaaaatacttcttaaaaatgtcaagcgaagaatgcagaataaaaaattatatatatatacaggctgggcatgttggctcatgcttgtaatcccagcacttcaggagttcaagaccaccctgggcaacatggtgacaccctgtctccactaaaaattcaaaaattagttgggtgtggtggggcaaaactaaaatcccagctactcaggaggctgaggtacaagaatcacttgaacccaggagacgtaggtttcagtgagccaagattgtgccactgcactccagcctgggcgatagggcgacttcatctcaaaaaataataaataaaaattttcaaaatttggaaataatatatgtatacacacacatatatatatatacatatacatacattttaatggtcatatatatcctattatgtgccagatgaatatcaggtaggtctctctctctatatacacacatatatgtatacgtgtacacacatatgtatacacatatatatatacatatatacacatatatacacatacatgtatgtacatttacatatatacatatatatgtatagatatatgtatgtatgtgtgtgtgtctgtgtgtgtgtgtgtgtgtgtgtgtgtgtgtgtgtgtgtgtgtatagagagaccgacctgatttcatctggcacataataggatatatatgaccataaaaatgtatatatatatatatatgtgtgtgtgtgagcatgtttgtggggtatgtgtgtatatgctttaaaggtttattcaggaaataaaccaacacgttttaatgatggctatccctggaagctgcaatgacaggttatgtgtattttataaaatattaataaatattggaatatttattgggaattttctgaagttcccaatttgtccacaatgaacatgtgtttattttgtagttagaaaaacatgttattacaaaataattcaataggaaactacttttagaaatgcatttatgatgcaaggtgaagcatatctgcaacatgcttcttgctgacaaagaggcctctgaagcaggcctcaccaatgttcccaacgatggtaaatttggcaataattgtgttgttaggggagctccaagcttaaatgctgcaattatgagctagggtacacaaggacatgttggaagtgacaggcaatatcagcttcctccaaaataatggtcaagcgaatatgtgcttttgcccaaaaaggaaagtagcacagctgtaactggatattgtaaataagtggtcaaaggttccctaaataagcaatatcatataagcctccttgaggcatattttttccttctgggagccgtgttaggctcacagacatgaaggcagccaggaaactgttatctgtttacttctaatttatttttataactgtccatgccagcaacaacaacaacaaaaatgtttctaggagaaaaataaatttggcaataaactctctgagttttcgaaaaatcttaccaaatcaaaaacttctacttatcatgttgctgtcaaacccagcctcataaaaactttacttataattgagtgtatgtatgtctatctgtactgtaaccttgatacttggcctcaaatcctggttctgccaggagcttcgtgcctttgggaagatttcctagcctctccacatcttgcttttctcatcttaaatgtagacaatattataccatgcagggctctgtgaggttgaatcagaaaatgccactaaactgcaaagcacaatcccaggcacattgtaaaaatggaaaaatcagcttgattccattcccctcttgccatacaaggatatttcaggtctctcaaaagcgtttcaaggaatagaggaagtagtcaaacaagtgtgtgtgtgtgtctgtggatgttggtgtgtgatgaaatatacatataaatattatatataaatgtatatattatatataaaatatttgtaaggatggaataactagtatctgcttaaacaacaactacacttcgaaaatcctttatttttcctgatgagttttgttcaggtgaagatgttcactggtaaaaagacaaggcaatccatttcttttctacagtgtcagctttgtttgaaggacacaatgacatctattcagaaaggtaccaaccattttgcttttaaaatactgaggcaaacctctctgaggtttcttcaaagccaatggcaacaaacatatttcagcatctgttttgcttcactgtaggtctgtgtgtgggtaggttataaaataaaaatgagcttgccattacagatactacttaaaaaccaaaaaaactatgatcatgatgttgataattctgtattcattatcctaataaaaacacataaatgtctagaaagaaatagacaattatgtattaggccttccgtctcttatttaataatagcagtgtcattgctctagttaaaacccgctctgatcttaataaatctgatgtaaaaacatatcaccagatggggactctgttaatcttatgcgatactttcaactatgatgactaatagttctataatttttatatggttgctcttattgaggaaagagtaaccatttaagggaatcttccaccactgttctttgttgaaaggaaggctggatctacatgcatgccaacatactactgaaaagtaaatatgcaatccaactattcaacaatttggaatcattgcaatttttatagttccagatggtgatctttatccagatgaagtgagactattttactactttgtcagaactctacaactaaatatttataaccctcaaatacacagatacattatcacagtgtgtgtgtgtatatgcacatgtgtgtacacacttttatagaatgagaatgaactaggttttgtaaaagtttcagttacaagccacatgcctatgttacacattctgtctgtaaactacctacacccacacacatatacattcatgcaccaatataatatggttttcaaaatcatgtcacatagttgatctcattttatctcaacaggaaccacagtctaattgaaataaatgcctctgccatgaaactaagtcagttagtaactgtaaaggagttgatttacaggaatatctattccatggcctagctaactgaactcattaatgacacatgttatgtaatgcttgttaaattagtgaatgctcttacattgaaagacacatagtaaagtgctgaatttcaggaggtgagctagtagtttcaatgtttgtgggcaccatttaatgcataggaagcctgcatttattgagtaaaatttagagaaaaaaagaggccctgcccattgtaactcaagattaagggcaacttcaatttcccagagcctccgtaatgggcactttaggagaggtgaatatggtttgactggatagagtacaatggctttttacattgataaaatttgctgtacaattgtttactggtgaactttttaaaaatggaaatagaatgtaggcttcatatgttactaaggatacccttgattatgtaataggcacttgcattacaaaaaatgaaaatggctgaataggtagcctgagccatagtttctgcaacctgttctcctttccagtgttattaatcacttgaacctcacctgctgctctggctcctcctccttgatctttacagatatgactttaggcagaaacagattcaggagcccagcaccacaccatcctgctgcagttaacttgaacatacgtcttatctctgattactactggcttctgctttaattccctgtgcttatcttccgtccctgagactccagtccacctggccttccaacataggcttaagatactctcttcctgtcccatccatgaactgcaagctggtgtatagagcttcctgaagtcacatgatccagacaagtgattaccaattttattggataccgtatctattagtaaaaaaaaaaaaaaaaaaaaaaaaaaaagtgcaagcacctccattacgtatatttattttcaataagttatgttcttgcactattatgtcaaaatattatctattttacaaaatacaagaaaaagaaaatttgtgagcggataagaaaaaatataagattttatttccatacctcaataagttgtcctgttcacgcctgggcatatgtctaggaattacctgttctgagccactttttaggagactgttatgttttgcccccaaagactagtcagggcacactattgccaatatgcctggctagatggagcttttcctagtgcctggtgagtggttcctgctcttgcatctatctgccaccttacccacctaccacccagtcccatcagcctctgcttcatcccagtgaaagggctcattgcggattccaatccttatcattttgtcttatgctactgtaattaaataatcaactccctgggacaagaaaaggtaaaagtttcttcaggagttagcaaatggctacaagcaataaaaaggtttagaaggcaaatagaaatttagttacatcattgttatagttgtaatgtagtatgtttctctcaatgggttgcaccagagttcttttttttctacttgtttctattgagatgttatttgtaaaatgtaatttatatctgaggtgtctacacatgatagatgatacataaaattttatctgtgacacaaagcaataagcaaagtagggcacatgtaacaaatggtcctgagacgtatagtgggaaaaaataaacttgtatccctaccttatattaagataaattccaaacagattaagagctaggttaaaaaatcacaaatacggaaaatgtagctaaacatttatctactcttaagataaaagccctcaaattattaaagcaaagaaagaagttacaaaagaaaaaaaatcaataaatttgactgtataaaacaccatgaacaaaagtaaaaaggggactaaaaattggaatatataattacaataaatgtgagctggagaaggttcatctatctaatacataaagaactcttgcaaaaagtaaaaaactatgcaaccccaatagaaaataagcgaagagacaaacagaaaattaacagaagataaatggctaataaaaatattaaaaccatttttattcacaccagtagtccaaaagtgttaagtaaaacaacactgaaataccactttaacctaatatgtggataaagattttttttaatgaaaaacatttcctgcagcagcacagtaagatgagaactctcaagcagtgtggcttggagtgtaacctggtataacctttagagaagtattttttgcaacatatattaatagtcttaaaatagtcatattctttgacatagttattttactaaggaaatattcagagataagccaatgtttcagttcaaagatgttccttgctgataattttaataattgggaaaagctagaaacagcctgaatatccaataattggcaaatacataagttacaaaatctttttagggtgaaacattttgtatccatataagtaatgtttgaaataatgttaagtgatatggaaaaatgctcatgataaaatgctaaattaaaaaaagaaattaaaactgtacaatccaggtaattgctattagtatcatacttgcttggaaaaagaatagaagaaaataactaagaattagcagtgattatttgggagtgtgttgaggttatgagaaatttatatttgtatttttattttttctatacgtgtgtcgtattgtgtgtgtgtgtatatgtgtgtgtgtatgtttaagagtcttgttccatcacccagggtggagtgcagtggtgcaatcatggctcactgcaccctgaacacaatcctcccacctcagcctcttgagagctggtactacagggacacaccataaaaaaataatttttattttttattttttgtagagacagggccttgctttgttgccaggctggtctctatttctaggcttcaagcagtcctctcactttggcctcccaaagtgctgggatttctggcattccaccatgcctggcctcttgctaggtttttaaagaaacctagaatgcacataaattgcctttataataaaaactattttaagggctgggcatggtggttcatacctgtaatccaagcactttgggaggctgaggcaggcagattgtttgaatccagcttgggcaacatagggagacactgtctctacaaaaaaaaaaacaaaaaaaattaaaaaaaacaagccaggagtggtggggcacgcctgttgttgcagctactcatgaggttgaggtgggagtatcgcttaagcatgggaggtcaaagctgcaatgagctgtgattgagctactgcactccagcttgggtaacagagcaagatcctgcctcgaaaaaaaaaaaaagaaagaaagaaaagaaaaaaagaatatgtaagggtcattgtgccttgaatataaatattttgtagattatatgacaagaattttaaattaatgttttcctatttggataaaatataaagatgtccaacaatagaatgtagttagaagctgtgaaatacagaactagaaaaaactttttaaaattcatatggaaccaaaaagagcccgaatagccaaggcaattctaataaaaaataacaaagctggaggcatcaccttgcccaacttcaaactataatacaaggatacagtaaccataacagcatggtactggtacaagaacagccagatagaccaatggatcagaatagagagctcagaaataaaactgcacacctaggaccatctgatcttcgacaaagctaaagaaaagcaatggagaaaacactccctattcaataaatggtgctgggataactggctacccatatgcagaagattgaagctggaccccttcctttcaccatacacacaaaaaaattcaagatggattaaagacttaaatataaaacccaaaactatagaaaccctggaagatgacctaggcaatcccatcctgaacatagcagcaggcaaagattcatgacaaagacaccaaaagcaatcacaataaaagcaaaaattgacaagtgggatctaaataaacttaaaagcttctgcacagccaaagaaactatcaacagagttaaacagacaacctacagaatgggagaaaatatttgcaaactatatatctggcaaaggtcaaatatcctgcatctataaggaacttaaacaaatttagaagaggaaaacaaacaaccccattaaaaggtgggcaaaagacatgaacagacacttttcaaaagaagacatacatgcggccaacaagcatatgaaaaaacccttaataacactgattattagagaaatgcaaatcaaaaccacaagataccatctcataccagtcataatggctattattaaaaagacaaaaaataacagatgctagcaaggttgtagagaaaagggaacacttacaaacttttggtgggagtgtaaattagttcaaccattgtggaaagcagtgtggcaattcctcaaagagctaagagcagaactaccgtttgaccatgcaatcctattactgggcatattcccagaggaatataaatcattctaccataaagatacaggcaaacgaatgttcattccagcactattaacaatagtaacgacatggaatcaacctagatacccatcagtcacagattagacaaagagaatgaggtaaatttacaccaaggaataccatgcagccataaaaaagaatgagatcatgtcttttaacatggatagacctggaggctattatccttagcaaattaacacagaaacagaaaaccaaatactgcatgttctcacttataagtgggagctaaatgatgagaactcaggcacacaaagaaggaaacaacagacattggggtctacttgatcagggagggtgggaagaaggagaggagcagaaaagataactattaggctttgggcttaatacccgggtgatgaaataatatgtacaaccaacccctgtgacatgagtctacccatataacaaaccttcacatgtacccccaaacctaaaataaaaattaaaaaaagaacctgtgaaatgtttacatatttcatatttgactgtggacaaactgctactctgctatactttatttttaaagttgtattgtaaagttgtactacgttccccataaagcaaactatccaagatacagtccagcagagtgcttaatggccataggctttggtgtccggaagtctaggttggagcactggctctgcaacagtgtgcaggtgattttatctctgcaagcctcagcccaactaaccaggtgtgtaattgttttcccctccatggatgccttgtaaatcttattttctaataactgaataatgactgaatatggttaaccatatcatctgggttttttttttccccgagatggggtcttgctgtcacccaggctggagtgtagtggcacaatcacagctcactgcagccttgacctcccagtctcaagcaatcctcccacctcagcctctcgagtaggtgggactacaggtgtgtgcaaccacgcctggagaatttttaaaaatatttttttgtagagacagggtcttcctatgttgcccaggctggtcttacattcctggactcaagtgatcctcccacctcggcctcccagagtgttaggattataggtgtgagctactgcacccacccagccatcatctagattttaaatgccaaagtgataatatggagcagatagaataagatccagaaataaacaaatacccaagtgatactttcattattgctttctttcctaggtacccttgctccccagcataacaacgtgcacacacagtcgtagcccagccatggttcttagcattgcaattagatcatcatcatcactgaagtcacattctctagtcacattatacataaaaatgtcaaagaatcttgccccctctttttttgatgagggagtaaactaggcaactgtgaggtttttacaacataaaattctttgttaactctgttgacatttggaaaaatggctttatgctggctttacagcagcataatctctatttgtttctttaaaaatgctgtgattagttactgtcttttcctttaaaataaacaatagtgctgccaaaggaaaaatgtataactgtttgaaaggaatacattttatgattaacatatctttatatataaacaaaataaaatatgacttctctctagttaaaatcatcttcataaacaaatacttcaggaatagattgttaattggcaagctaattggatgcggtacttgttctgggagcatctttattacttccattactcaaactccctccacctgcaaacacagtcactacacacagcgtactcctcattatcacgatgggatatagatgatgattgaagaaaatgtatgcatttttttcattaatgattttactcctctcaaagggacttttaactctaagtaaagtctgtttatgaatttctgataaaaccaaattattttacattattaaatttcattttcatagaatctcttttctatatctttcttaatgtacttttaggcaaagtcaagttatttttcaaaattgggtttggttagaattttgatcattaaaaaggatattaaattattcttcctccagctggaaatcaagccctctatggcaccctagaaggaatcatcactcagtgaggagtgatgtcataggagtgttgaataaataaatgcttaatgaatacatgagtgaatataagaatgaacaaatctataaggcaaacgaattttgattctttcctatcatttaataaggcaaactaatttaaccaaaggcagaaatcaaatctactggtgtgtttcatgtataaccactataggtaggttttgtcttaaaaaatagaaaagcccaaaataagacagctgattctcaagcaaagatgagaacaaacacaaagcccttccagagctacatgatggaaactgtgcggaaagtaaagactccctcttccagtcaccaacacatgatacttggagaagaatgtacaaaaaactgggaagcacttcagacagactgcccagctctatttgctaataccattaatgattagttcacataccaccctcctatttctcaatcccaaggttcactcagatgtctaccctagttttccctcctattttgcttttgatgtggattgatttgaataaaacatttaagaaacactaatttagagtaagagctaaatgtctgttttttaaatggtgtcttggcttaaagatagaaaagcagtcattaattttttgtcctaataactaaaaatgatgtcaagcagagcagatggcaagaagagtgcttgtacagcactaagcacctcatggtgccggatgactcaaacaaagcacaggtcaagaagcccctggcctgaccaacattggtcagaggagtccaggaaaatacatttcttcttcttcttcttttttattttttacatttcttcttctttacattaatgaatcaaattttcaattgaaaaattaattagcacacatagtaaaatttccccaagtttaaaatggtgagtactcagcccccttctacctcagattccaaacgtgtagccacctcttcctcaaagctagcaacttctaccatcaccttaagtgcatacgcagaaagatgcttttgagtgaaacatatttatgtatgtacagtcttagcatatttttccataactgggaacattgtgccttaacttttccacttaaaaatacaccttgactacatcaataatgatgcagccattcaagagaataactttctgctgtaagaaacatgagaatgcagatacactggaaaataaccaaaaggttaaacttagagctaccatttgtcccagcaattccactactaggaatatacccagaagaaaggaaaatatatgcacacacaaaatcttttgcataaatgttcattgcagcacatttcaaaatagccaaaaagtgaaacaacgcaagtgtctatcaactgatgaataaataagcaaaatgtggtatattcatataatggaatattattcggtcctaaaaaatgaaatctgatatatgctacaacatgaatgagacttgaaaacattatgctaagtgaaagaagcaagtcacaaaagacctcatattatataattccatttatatgaaacattcagagtaggcaaattatagaggaaaaaaacgtagattagccgttgcctagagctgtggggtggaagggaggcaggtgatatggagcaggtaatgggggagatggagggtgataactataaggtaaggggtttcttatagtggtagtaaaatgttctacattgattttggtgacggttgcaaaagtgtgtgaatatactaaaaatcacgaaattatacaccctgtattgatgaagagtagggtatgtgagttatatctcaacaaaggtcttccagaacaacacaagaagcttctctatgtattgacacactgtcaagtgcaaaatacaaactgcagaacaatgaatgtgcagattatacttctttttgtttaaaaagggaggaagagaatagaatttatgttttcattgcacttacataaactctaagagtatatacaaagaaaactagtgaaaatggatacatgggagtgtgcatatcttcttttcaaagtataaaaataatacaatagtaaatgtcatctggagatagtgtcatactagagaggtcttcctcatagatgcacagtattgtcttatagttgtgcatcagttgttcaatcagccatataccgattgacatttaggctttctccagtgttctgttacaaaaactccagcagaacatttttgtacatatattttttgcacctttacacaagtacatagagtaaatgttaaaaaatgaagttgctagataaaagatagacaagaaatccttaaagtaatgcagctaaagaatatcccttaaatttgttgacaagtatagtagctgtaaccccagtagtattttattgcaattactgagcaaaatacactttctttctgataagaataaatgaaaacaggatttccccattctctgtagttagagcattaaaaaggaagcacaataacttccttttaaaagaaagtcagacaaaaaccaaatggtttattctatgtaagctctggaagttgagaaagagaagcctccttttaataggcatgaatttgtttgaattcattatgtggcttctcgagtgctctgcagatttaaaatgacctttcagcctcaaagtgggagtctcagagcaaaaggatgaagagaatctgtttcaattaagataaacatcaactaccaagccccaattataccatttgaatttgaaaaaggcaaaactgttgtcaaaaaaaattggaaagcatcaggacagcagtaaacctggtaaaatttaattgcatcacgttttgatgatgttactgagtgttcatggaacgtagggctatgtttggatgcattcctccttttccttccctccactctccctggctcattttggagttgtttttgagtgattctatttagctgcattggcatctttacttaaatggacatatctgtgcagagaaaaccctgttattcattatggtcaaagaatggtagatattaactaacaactacgtaaatatactaaaaatcaatacattatataacctctatagatgaaaagtatggcatacgagttatatctcaataaagttcttccagagcaacacaagtagcttctctttgtatcaacatactgtcaagtgcaaaatacaaactgcagaacaatgaatgtgcagattatgctccattttgtataaagaggggggatgagcatagaataataaagtgatacatacatctttaataaatgttatgatgttgaaataattacaatgcaatacatttcatactaaataaaaatcgtatttagttacttttggttgttattgttgcttttgtcatgattttgctgttttgtgaccaaaaatatacttgagaacttgcatacatgaggaaaatgatcgtggcaatgatgtgtgatgggtttcagttcatacaggccaaactgtgtttgctgtttgaagctgatggaacccattcataaactccttaagggtggccaggaaaaagaacaccacatacatcctgagcagtctttccagtaagaatatcagtacctggcctttgatatgtgtggctgtcatgctcatccctactgcagtttggggaaccacggcttacatctgtcttttgcatcaaccatgtcattcatccagcaggcacatcctattaccagctgaaggccaatattacattctttgggaaaactattccaaccatttggtagaatttttttttactcacatatatctactatccaattacatttagaactcagatcagaggcaaatttagctcagagaggcattagaacactgaaatctatgcacttatggcaagagagaattcagcgagggttgcctggtgtgtcacttgctacttaaagtcaaagtgagatcttacacctaataaaaatgctcttgtagtttagcaagtcaaactcttgggagggtcttaaactttgtgtaaagagaagggatttacagcagcagaacattttcaagggcacttttatgtcagaagcctttccttttttcctaggtgaagtccactctctctgacctcggctcaccaaggcccctgggaagacaggctagcaacagaaatcaggtcagatatgtacagaaaacaccccagtcaaagacaaacactggagacttgtaggtaggaaacccatcatttcacgttgtccaacttttcactggaaatctatacatgagtgccatataaatttaagttcttaagacagcaatctttcacttcttttcctttttaagtgattgaaaaagatagcctttctgctcctcatatctgctggatattcaagacctttgtacctgctataatccccttctccccaatgtttgtttgactggttctttcagttctcaacttccctgaccactccaactaaagtacatctctaggacacacagccacaaagagacacacagacacagacacacacccatacacagacatacacaaacacactgtttaactcggtccctcctgtgttctcttcactggacttaaaacacaattaggaataattttatttagtgaatttgttttgcttggtaagctccaggaagggagggaggcaccattgcatctccagagcctagcacagaaaggagataaaatatgtattttttctgtatagaaactaccctaaataaaactgtagaaaattattctaaataagaatcttgctgttgaactattttatatataaaagtatatttatttcttatcttcttgtatcatctttgtaggctactattaaaatataatttacatatctctaagaactgagatacattgttatatcagttagaaatatatatcatatattatatatcatatagataacatatatataatcatatatcatatcatatatagatatatatatcagttagaaatatcagacatttcagtttagaaatagcatatttctaaataatatacaatttagaatataagatatatatattttaagaagactatgtcaaagaagtttcaaggccagatttagttagaagtgatactgatttttttccacattcatgtgactttaacagaataataaatttagattaaatctaattcatacttttattaattttcaaattaaggaaaaattaagttttacctagaactgttaagacattttcagtaaactttccattatcatttcacttgtgagagatcatatacatgtcatatcatacaccattttgtaaatggttaaaattctcacattctcaaacagtaacttgttttaagactaacatgaaaacacaaacataaacaagaaaatattaataggagtttttcccttctaataataaactggctagcattttttttggtttgctgtgtccctaccattacttcaagcactttccatgtattatttcacttaacattcacagaaaccctatgggtagcttttcccccttgtccaaaatcacccagcatgtaaaagaagatgagttccaaattcatttgacttcagaatccacccccatctctccagtacatattgttggcaattccaaactgccctggaattttaatagctcagctctatgttttcctacagcctaacaaaatagaaatactttgaatgaagttaagcacataaggtctgacttcgaaatgataccaaggtttaaaactagccattaacttttacatggaacaaaaaggaatatttataaagccatacagaacatggccatctggcctactcctgatgcaagaagctgaaacatgcttctgaaaactaagtgctttttatttctttctttagaattgttaaaagtttcttggataactgagaaaaaaaagaacctactttctcttgaggatgccagagtaagtatctttcatgtagcattaatgttctatttacccatcaaaaacaagggttaaaagcaacggttacacagagtccctccccaagcctctcatatataatcagaaatatcctaagggaccaattattttctattactcctattagtcagaaattcacatattgcaaataataatttcttctctccgtcggtctgaatgaatttattcaggatgttatactaaattagaaactgtgaggattatgaccaaacaagtttccatgaatttaacatttttttctacaaaactttataggatttcacaaattccagcatcagttgatacacaagggactcccctttctattatctgactacctgaatctaccctgtcttagccaaaatagattatctgttactcctttaaaaagattgtcctgagagtctttttttctttttctccccaagttggttcccattctgaatttggacactaacgaacatagaaatcaaagactgtaaagcaactatttattcagaaacatttcagaagacactaaggtttttatttagtattcaattaagacttgcctcgaaggctgggacttctttatgtgaatttgaaatttacagggtatgtcacacctacgctatatttaggatgcaactgagtgaagatgaaatgcctaaagcaattggcaccaagggaatttggtactttaaacattttggaaagcccaagattgcatgtgtagttacatttcctatattctttctctatctcttttatacacttaacacacaaatggcatgaattacgaaagcaaatgtgtttggcactttgaacaaattatccatcttattgaagtaagttagctaaaacttttctttgtgtattggaaatttagacaattgtttgactattaagaaatgatccatgggaaatttgaaagataaacttctgtactttattcaggaaattactaacaatttataagaaagtcaaatcgtcaatataacagaaacagtgaaaaaccaaaaaaaacaaagcttcaaaaaagctaattacttaaggagggatgaccaagcatataaagctaagagaagggagaggttcaaattagaaattaatttagaattcaattaaaatcttataagtaacgtttataaagcttacaaacaaaatcttacagtttttcccgattactggctaaagtttataaaaatcatttatggaatttcccacaatatacaccaaaaaaaaaaaaaaagcagaggatagtaaatgggatgggttttaaagtcagactaagttcaaaactagccatatagaactggagctgctgtaactgcacacaaatggtatagtagtccagatgtatgactggcagtcatagaataatgtggttcattgtgaaagtcagataataatttgatattttgttgtaaacaggttttccattcttgcatggtgcccttttatggcagttgtaatccttaagggcaggccttttaactgaactacactaggacataaatgccatttccttctgatttcctgcattgaatctggtctttgatagtccattcgaaagtttttgttagatccctatttgatgtaatggccttacttattaatgcagttatagccagggattatgcacagtaacaaaggaatatataacagcactcaagcatagtaatagtaaaatgagtttatttagagagctgacaaacaagctagtagcagttatttatagaaagaaaaagtttatttctcttattagtgaaatagagcctcaagcattcaaaaaatattttaactagggcctataaaaataaaggtctcccgaagattatctgtaaagacagattttggcaataagtgaaataatgccttatattcattttatgagttaattttgtataaaattcacttttttccaactattttttcctgatgtgccctttttgtgttccctctctacagatacattaaaatgttctactctgtatattttatctttgaaaactcaaaggctaaattcattaaaatgagaaagaaatctgttggttttaaaatttatttaaataaaaataaatttaaatatttaacttggctgacacagccttgttaggaggtgattaagtaaacaatttacctagaataaaaatatctcttattaaaatggcatggatttccaggccagtaagaaaagaaaatatctctctaacccagggaaagtattttggtctaaaaaatcaaatattccagatttattttatattactccaccccaaattcaagtagggaggttttaaaattatgttgtttaccactggatttctggaagcaactgaaacacttatataaatgcacactcctaccaggaaagtaaaaactattccaaggatatagtagaaggtgaaatagaagtctcctgccctatagaaatacttcagaaagtcactagaccataaattttatgaagccgagtgctgtatatttcaccattgtctctctaacagccagcagggtacctgtggcagaacaagcttaataaacacttaaataaagcaataaaaaatgcacctttacttttgtaactaatagacccacagaaataaaacttttctttaaggactatatattttaagctatagaactagactaaatgatcaggtagctagaaaatgtttctgtacaatactaaaacaaattacttcctcattattaaggattaagccttaatttccttctttttttttaagcctaatttcttgccattccaaatatttaagtctgggagtgtggtaaagctaaaagctggcttcacaatcggaaaagttcacaatacaagaaggtaagccaaccctaagttgttccctgactttgaaggtcgggggtcaatccctgtgttagggctccaggacaagcttgtcactttggttcagcatccctcctgtggaatctgctcatatgtgacaactgtgtggggtttcaagatgcacacaatgaggttagagtgagcctgaagtggtggtcttagtacttaccaccaacagatttcttggcttcatataaaaatcacccattgatagagtcagaaggtcagcatgtcagtcgggtgataaccatgtgcaacacatttatcagcatttctatatgcactactctttactagtttatgacacgagaagagtcattcgagcagtcagaaaatatagaggaaaacttggaagtatatattttagaatgggaaacacaggaggcaatggaaggtgtgcctagattagaattgccagtggtggtggcaaactaagggtgaaagaaagccacagggaagaggcaaaaatcctcccggatactatacaactcttgccataaagagtaactactgtgtctacaactcacccagtacaatctcctgaaaagtgccatctactaaaagaaaattaaaaataaaaattgactgtaatattctttgtaatatggaagaactcactgttctactttccatgcaaaggacagatgttgaatgcccatgatggagcaggcatggtgctgggaacaggggttcattgctctacaaagatgagcaaacccagtctactccaaaacatgctcacaggagaggtacgtgagacagaagacaataattgtaatccttcaagagttagagaaatgtacaaggtttcatgacagcacagagaagagagttttaattctaattggggaagtctaggaaggcccttcagaagaaatgtccactgagggtgaatctaagcaacagaatttggatattaaatcatactaaaataattattgtaaaatgacaacagtttaaaatgctcaaatagtcatatataccaaattattatttaaatagaaaatctgatttttaccctgaatttgtatctcaaacaaaagtttgcttaattacctatacttaagtgagaatgaatgaaccatatccgcatcaacaagggatcatctttcaaacataattttgcaagggggtgagggaaacagccaaacacaaaagagtacatgctatattattccttttatataaaattcaaaagcaggaaatttaaaaagtttgtgattttcaaaatcaggatcactattatttttagtaggtgggggcaggggcttaaaggggcataaaggtgacttttggctgctggtactatttttaatctgggtggtgattacaggggtgacctttgaaaattagaattacttatttttcttctttgcatttgcaacatccaaaaagagtttttctgtttacaatatttatatgttcttcataggtgacaaatagacaaaacatatcaaaaaatacacatgtatttgtatgtatgcataaaacctgtttctgctacaatgactttatttgcatgcaaatttaatggtgagattagatatatagagttatgatgagatcatcaaggccatttaaatggcaagcagccacactatgtccctcttctgtctggcagagatcaccaatggatcacagcacattttctctgagaccaacgcagctctcagtacattattccaggcagctactgctattcgtaattacaagttgcccatagattaaaaagactagctatcttggttttaaacaatgcagactgtctaattcttttgatatttacatgaaaaagatcttgcaataatggagggatttcacatatatttctaggtaaacataaaatttcattcctatgtacgtaaaatgattttttcagttacacgaatacctttaaaaagttgtctgctaacatcaaatttgcttttttgtgtgtgttttatattaccctagaagctcttactgattcatatactagtagactcttaacgaaacacagaaaagtaattgggctatctctttttaaagcaaaacactcagggaatctttaatggttaattttttttcccaagctggtgaactccaccctcaatcacacttaatccaatgtgcagttgttaattataacaaaataatgcttttacagtttgttttgttttgttttggtaactactcataataaaatagtagatatcagagacaggaatgctaaatgcctgctctaacgtattgcattcttgacatttctagcccctgtggctgttcagctcatcctaacacttcacgccacaagaacagacctaaccagatctctatttttgtctgttgttctttagaaatgatggagaaagcatcttaagccttctgcactgagctgggatggcgggacaaaggaaaaaggagtccttctcagtctggtctgatagagatgatgaggctcagctccagggagataataatctgtgaattacacaaccaggaatgcaccttaggactagaagagtaagggatttgtagaggtagagaatgcctggcagtgtgattaccgtaggaccaagccacagggtggcacccagtaggaaagatacatggagaaagtctttacaaaggtgcacctagagataatgctcaggtagctgaccattcctttcagatgaaacccctgcctagttgtgcttccttagagggttctcattgagttttaaataactaaatcagaggtggtttagcttcccactgaccacttcttattttgccacctccactaagtagtttacttctttgacccacctagatagcagtgtgtcttctttgaatcacactattaacgtgatttatctggaatacctagctctatataaatgcttaattctgactgtgttaaaaaagactaccttatggaaaagaaacccttacaaaatgaatcagctttcacatttagagttcttgattatttagaaagtcataccaatgtgtaaacttcaaaaatgcataatataagctaacagttcctggtcactcacaaggagccagccatgtgctaagcacttcaggtagatcaactcattgaacatattaacatatacatcattgctaaaggtaacattttataattaagaaaatatgcgaatcatgaaattatcttatttgccactcaaatttaggcaagccactttacttcattaggcctcagtctgaggaataagactaatgagtactgtctaggattcatcatgaggatctaatgagataattaggtcaagtgaacagcacagtgcctggcacatagttaagtacacaataaatacaaattgccacaatttttaattcagatgaagactatattgagaggaaagaagtaaatttaaaatttcaagatgcgaattacagctacttacttagctatatgacataagtttaggaattacattatagctcaatacaaattataatagaactgctttcacacatttgcctgacagactaatttttagctctctttttcagctcaaacttcatttttgaagttaaaaaaatatttctccagccaggcatggtggtgtatgcctgtagtcccagttactgggaaggctaaggcaggaggattgagactaggagttcaaggctgtagtgcatatgatcacacctgtaaatagccactgtacctcagcctgggaaacacagtgagaccctgtctctaaatatatatatatatatatattcttcaacaaatctttttaccacttaagcattgacattgtttttaacagtttttcttgaccctacttgactggaaatgttaaagactagcaaaatgtttccagctccacattggggttaggggtggggaaaatcagattataggttattctctgtggtctcttttatttcaaaggttttatggtgctactaactggtcaaatgccagagagaaggaaaactgcaatttatagtctgaccagaggaagagagtcaataagctgaacgagtcaggaactagctagatctccaaggaatggagccgtgtcaaagtccatgttctatttctcaatatatctctagggctcacggttggaggcttgtatacaaatcttggggggaaaggcagacaaataccataggcaaacatgttcttgatatacataagattaaaagaagaaacttgaacagtctaggacaggaaggaaaagtataagtagcagcttgttgactacttttctaataccatgaaacagaactatgtgtagccaaagcagtttagatagtgaggaaaagcaaacaaaacaataagaacaacaacaacaaatatgggatgtagtttcgacagaccaagatttttctgcagcactgtaattttataagctgtgcgacttcaagttttattcatacagtttattcatacagttgcttcaactgtatatagtactaagttcattgtctgtcaaagagtagatgcccaatacattgtagctatcattaatgaggttatgactccaactatgactatagacctagaagctgctttctccagctagctggtgatctagctgccaatcagttacttgctattctataacaaagttgcagtatcagagcaaaaatcacagcccgctgttgcctatcccatgttagaatgccattggttaaaagtggacacattttacagtaatttatcctgactaaaatagtatcagtcatataaattccttgatgcaaagaaaaaactctgtgccacattgcaatggaatgacatcctgaatgttaggaattattattttctgtattccatatgaatgtctcaagcaagttcactaaaaagagctcaatttctcatctttgatgtattttaaacaagaaagagaattagatacaacgggagcacttttctctaggaagtctgaaaacaattacatactgaaattatgtttaatgaaacatttattttaacaagtcacactggtgccatctattttacaatttagaatgaatattttgcaatatgaaatgaaaaaagaccaagaagtcactcactagcagttttcaaaggccataaagaagaattggtttatctattgattcactctcattatatctactgacaactaagaggaaatgggttagaatttaagcaaagaagatttgtattagatataaagaaaacttcctaactctgtgggtttaaaacaacaggactgcttcctataagggtactttggaagatgcaatccttggtgtgcatacattctacacctagtttctagttttctaatttcttattcttcctcatgtgtagtagggaaatggaagggcttgcaggtgaccccctttaccctatggcagaaattcttagggctgagatggggggcaaatgtcctctacactgagtttcattaatggcagcttttgcccagaggttgccagtgttattaaacagggtagggtgctagatggtggatgcttagttcaaactgggctggaattcttccatattggtctctgtataatctcttttttcttgccacacttccccagctcttctcttgaaatattcccttgtgtttttctaactcttattctgaagagcagttcacccttctgttagcttctctaattcgcatcctcagccatcacccaggatgctcattagggagccaatccccttagaaggcttaggacagataataaatacttacaatattgcccctgtcatgctaaaaaactgcatccataggttctggcattcttcctactttccatacttttgaaatgctttctaatttaggtcaaacttgacaaagaactaggcaatttgagagctgagacatatcactggcacgggctctcattagttagttacctgtacacagttatatttaacagtgtctcacccaggcttgctgtcattgtgccccatgtggtaccccagcccttcccataggcaccaatccctggagagatttggtgcttgtggctgaagtataccttacttctgtccattttctaatataccttcaacccctgtattatattttgagatattggatcacctctggaaaggcttccaagaaaatctatattgattttttattaagactgtgctttctttgtgactatcttccttaccaacctagctaatatccctcaggccctattctctatacctttatctaaactttgacaattctatatgtttagtattagtattattgggaatatttatacatatcgctcagcatctttccctaaaaagcttaaaaactccttaaaggcctcattaatattcttccccttcagtttcatcttagaatctacttttctcaatcttgctagtaatggttgggtggatccatgactaaccattcgtatactcatggttaccttcatgtcatcatcccttctgattcaatagaattcactacatgattggaatgattgacagaggaactactaagtgagctattcctttacctctcctaaaaggcaagttttaatgataaggccaaaaccatggtgtgcctcagatccgtggggaagaaaaaaaaaagagttgcagtcaggactaagtattattgcacacataaccacagccagttgacatgatagaaaaagagggtggagaaccccattttgaaataccaaaagaagcgtcttgcttctgaagaatttcataccaattcagcatttctttaccaacaaccatactcacttcctgaattatcagctatgcatcatacagtgtttagtgcatgattttctcattccagatgagcctaaaataaacttgtaaaaaataagatgctaaataaaatgaatagatcttaactattatagtgataactcttctgtgatatctcagaagtgggaaaagttacataacttcaaggtcttataaggcagaggtatttgaactgctacattacctacgagtttatcccaatccatatagagatacagaatacacaaatgactctcccgcggtaaggcagcactgcagagagtaaaactgtaagtgatcttaacagtcattagcttagtggttttcaaacaatattccttggaatcctaaagtctttagaggtattttaaggagagggtttgaatttggggtggggggtaaatgtacaaactcagtggctgttttattgttttatgtgtgcttatactttttacttatatatttcacacatatctatgtttttaaaaattatatctatatattgaatttatatatgattttatatctaaaaattacagtataaatattcatttatattaacttcaactcacatttcattaataaaaaatgtcccattgaaataaacgtgtttaaaatccattgacctgccttgccccttttattttacaggacagtagacttggcttcagagggactaggtgactcctccagggacacagagcatgttagaagtacagtggacaaatggctttttccagggaatctcatacttcatgactttaaagagtaaacctatctgtgatccactctgtgtctttctagttatgttttaaatacatcaaatatttcaaggtatcttaatcatttctaaaagctgtatatctttaagtatatttcataacagatacatcactaacttgggtaataggaccaaaaaaagtttacctcatgctcaaaaccctgaaccaactttgacagtagtcacatacctaaaccaaatcataatatatattgcacaggcagaaaatatgagaattccatttgtttgcgtatttacaagtttctaagatagaagaaataggaaggaagattgcatatttttttcaaagctgatcttagatgtcatacaaaatctgatatgtactacttgtttccaacctgaagccttacagagcttgcagagaacagaaaaacttggtaatagaattggaaagataatctattcaaaattgtgaggcattggccttttgttctttattgtctgttataaagaccagaggaccttatttgctaccagtagagaatataatggtctacaagctgcaagagcctttcacaaagctatttttcaacaaccaacagtctttcacaaagctatttttcaacaaccaacaacgtcaaccctgaatttcataggctaccatacttccgaaaagaaaactgccaaatactgtaatgcatctagaaatattcacaacatgaacacttttatggccattaaaaagataattatatccacagtagaggaaggcaacaagctgaagaaccagagcacgttctttgaggtagacagacttgggttaccccagcctatgaccttgctcaagttatttcatctcacggaatcattttctcacctgtaaaattaggattaacaactccttcttttcaatattgtaataagaactaaataatatatatgtaaaattcttgatagagctctttcataagacactcaataaaatgaaagctataagtattagaaaaatggattttttttttttttaaattgagacagagtcttgctctgtcacccaggctggagtgcagtggcacgatcttggctcactgtaacctccacctcctgggttgaagcaattctcatgcctcagcctcccaagaagctgagattacaggcatgttccaccactctggctaatttttggatttttagtagagacagggttgcgccattttggccaggctggtcttgaactcctggcctcaggcgatctgcctgcctcagcctcctaaattgcaggtattacaggagcaagctacgccgcctggccaaaaatagaaaaatattgatatgttaaatgaagaagcagagtacagaaatagtatttacagctatttaagatatgtaaggtaagttgaaaatgagaataactgaggatggaataatggggttaatgggttattttccttccaacatattaatgttattccatctttttgattctcaattataaaattggacattttagcttatatgaatgctttccactgtgatcatgaggccaaaataagaatgctaagccagtctagatttttacaaccttaagagaaaagagctaataaaaaaattataatcctccattggtcagagttgcaagaaaattcagaaaattgtatccaaccagtactgaaatactcatttgcatattatataacctgagcaaattgtggtttaatgtctaagtagatattggcatatataaagatgagcttgctaatacatatagtaggtatatttttaatattttaaactttcatatataatactttattgataaaaactacatacaatatgcaaatacagtgaagaaaagagaggcagtcccccttaccttcactcctaccatttttttttttactcctaaaaaataaccactaccaaaagcttggacagagtcttccagaattttttctgcatctacaaacctaagtattacatgtatacttattacataataatacttataatgaaaagtataagtactattacatatacaataaccaattttaaaatttgctttaaaaacaaccacagtcatattttgaacagtagcatctcttttattttcagattacataatgaatgatcttacatgtaacacataaatcctaaacactgttctgtcagcaggaaagaaaaaagtccacttccattgactaaacttctctttatatttatatttgtaagactaataatgttttacttacttaaactaaatcacaagtcttaattacattaatgagaagtatccctgggaaatgtttataaatgtttataaaagtgttaaagagatatcaaggaatatgtaaggtaatattttcatagtatataacaactgactaaatctgaatttaagatatgcaagaaaggcaaacaattctgcaatcaatgaatctgctaattttattagctttatgagcataagaaaatatataaagtttttctcaatttcatgcaggcacatttttttaaaataatgcttaagaataaatactataatcactttctgctagaacgtggcatataaataactgttccttaaataaaagcaacctagtatacacctttattaaataaaccctaaatttggacacctatgttacaaagagacaaatagattaattttaaggttatttgtattttgtcttgaaattaataaaattttaattataacaggctgacctttaataagaggaagggtataaaatacaagtttgccatgaaatcccatttaaaatgtgaatatctcatagcaatttaattaaggctgtaaggacaagttagtgtggactgctttttatgatacttggagagaaacaaatagaaaaaggtaaagaagtaatccaaaacattggattcttgcacaatacaacaaacttccaaacgtaatgtttggctttagggaatcccggaggacagtagacagatttggagaaagtagaccaatggaacacaaaatagatttatgtaatcagagtgaagatggtaaagccagaaagatgtgtcccaagaacaaagtattttggagatcaacctggaaacaaataaacatctgaaaaagagataaatggcaaagttttaggtctctctcatgggaagtcaactgaaaaggaatgagggtagggtggtggtggagaaatgcagacagcaacactggtgagaaaacattgtccctctgagcaatttgaggcctgtggcctttatgtgcagaggcacaagaagagaggccgtttgggtttttttaatgctcaagtaaacatgtgtgtgtgtatgtatgtgtatacatatatatacacacaaacatatattttctctatataccaaatctataatctatattgattttatacatgtaattaaataaataaatataatagatgtgtctaatatttgactgatagacggataataaaatggcaaaactgttactacagctgattataccctcaggccaaattttttggcagctgcagtgatatacccaagcggttatattattaagtcagatgtaagattaataactggagaggtttctatagtgtgtagttaaatctaagaatcatgcatatatagagagagatttatttcttacacagaaatcattctatccccaagtctatggagaatatttttagttaaatggaaaaatacacacattaacaaatcaaaatatttaaaaatgcattttaaattgtggcttgacttatgaaaatatcccatacaatttaaaacaaaaaatataataattgtggataaaaatagactatgataatctcagagaggtaaagggtgtcaatgttactcatctcctgaaatgaacaaattatttccaattgaaacctgaatttgaaaatacatctcctggcagtttagacaaaaagagaaatagtttggttaaacactatttttaaagtagtaacatcttttcacataggaatggtataaattataaatgagttaaattcatgtatattataaattctgtttactcatgttggtgatttatattagctatggtaattcatacaaggattttaaggattttccagtatttattgtttgaggaaaaaaaggacaggactctccaaatttgtttgcagatgcaatcttttctttaaataaactcaaggaataatttattgcacgtgttattttgtaagaaatggcaagtaacgttaagagacaaaatcttcatctataatttattaaaactcacagaaatactgcggatggggcaattcttgtttctggttgactgtaaaacactacaataacagcaaaggctaacctatccacaaaaacacaagctaaattcctgacgcaaataatttgagtatttacatgtgtgtttgcctgctcacatgataatgcatattttgctggcctgttttcctcccattctcaaccacctcacttcaatcattgcttttatttccccagtgtgaggtatgattatttccatttcaaagaggtgagcttagttatttataatcaatcactaagaaaaacaaaataagactaacccctaaaatagccataaaagtattttgtaaatacctattgtagaaaaaaaagttactttgttggaaaatactccttaagggccatgccatatgctgattagcatatcaaatcaccattggggaaataatagaacattagaatacattgaaactgacatattttttcatcagagtaaaagcattaaaataaccaaaaatataattactaggaatcatttctaataaaataaaacataagagatgaatgaatgataagcaacttgatatacatttagccacatagttaaattcaagtttgtttcatgtgtatgattaaatataaataacattattaatttctaacacatctgtgctaaaagtgagggtattgcttttaaagacaagggcaaagcctgtcaaccaccagcctgcttgcagcaagcaaagaagataagaaaacaagcaactgaatcaaacactgaaaaatgacaagttttcattttcaaaactcccaacatatctgcaagtttctttcctcctttaaaaattatcatcagataaattgttacagtccaagaggaattaaaaaaaaaatcagcacccatttggttaaagcacatgagtttgggaacaaaataaagaataaaagagccgccaatactgccttctttcacaaagcctcgacatcacacaacttactaaatactcaaggagtacgtcaatcttaaaagagaaaaggggaaaagcatgagagaaaagaacgttaccaaactgcctctgcagtccttagggaacttgtagatcgggatcttggcttcataataatgctcattttgaaaaaaaataaaaaggaaaataagtcttcaactattctgattaatacattctaactgtctttctgcaaagaagattttaaagatattccatttccaagggaggctgcttgaagaaatccaattttcctggagtccatctcctgtcctcggtccagctcatgggcaaggttctaacacgcaggagcgctttcttccttcatactgaatttactccagtactaggctgttaggaagtgacagtttcttctgtgtcttgcaatgccaagggaggaactgaattctgaattgattcttcatctgggtcacaagggaaaccagcatagtgaaagagtcacttgatctcttttttgcaattccatagtaacagctttaaaggtttctgacactcgaagagcgcaggtagagagagagaaaaagaaaatgaccgggaggtactgtaacacgggagagctgtcaaggaagttccatttcagggcaagcacaggaaaacactcctctccgtggagcaaagaagtcagccaaggaacaaatctctccacactttggctgggtgggctgatttacctgcgaaagtaatttctgtgtgtccctgcttagaatccagggttttgtgaatgagaactatcattcaatctcaccaggcagaaactattcctcaagggctgtatgacgtctgtaagaaggcagttcaaaacaccgcagggcagtgagaaaggaaaaaaaaaaaaaaaaaaaaagaaaagcccagcgcccagcctagcctcgtcaattgctgagacttacaaagcaaaggggcggatcagctccagagaccagcactgtaaaccggccaagcagacaagagacctcacaaaacttataaaaccatttccttctctgggaaatgagatgtctgtgttattctgggtaacattccgtgatcacctttacaaggaacacaccccttgccattaagttgtttatttaccataataaacaaatgaattttataaaagtcattctttcaaaaaagtatttcactgaagcactaaaactaaacttttctctttagaagcaaagttgagagaacttgatgacttagcagctgttcattttgagcggatgtaatgaaatgtcatgctttggagttggttgtagagatgtaaattacctcttaaaaattcagcagagtgtaacaggcacccttggatcagaacatactggaattttaaactgaaaaattgaatgtattattcctggacaagtggctgcacgtattaaggctgttcccttgcacaatgttttctaaaccttatttttttttaaaaaaaatgcaaatttcattcatctctacacacaaagacttgggtttgctaatccttaacagctcttcagtaaggaatgaagctttatatcttgtcaatatctcttattatttcgaaggccaaaacctttcccacctcctaaatataaaatattttctattacagtagatataatctaagctgattccaattgctcccaacagaaggaacagttgaccagcctgcctatctctctgaacatctacacagaggatatatactcctctgggtgtgccaacttcaattattttggatgtgaattaccaagtgaaaataatgtaagcattctgattgcttaaatggcattagctagtacgttggttctctagtctgacgtgaacttggtgtttatttagcatttgcagacaggatgttggagtgcagttgtgacccacccaaacaacttggaaaatgtagtacggcatccgccagaggctctggctgcttcttacaacaaacccttcatctgctcccctggtcacacttcaaggtgcatttgtgacttagtcttctttcaatgactctcaggcctcttacggtaaatgccaataaattgctttccacatagttatccccttaagcttttcagtttccttatgactgccaggggacattcacactttcttagcactgtcccatgtctagtatattgctggcattttaaagcaggttaattaatcatgtatttttttggaaacttaaaagttttgtgagactaattatttttaggggagaggggatttagaggaagaggtttaatttttttcttattggaatttaaatgtgggaaaagaaagaacaaaagcaaaccaagtaaaattaggcaactactatttatttgaaacactgttccctccatgtaaggtctaccaaatagcttccagttgccatttcagaaagcaaatgacaatgatcagagaatgtaatgtctgactgttgagttttcaactctccagaaataattagcctgtgttctaccgtcccccagatccatgttacaatgagcttatttagcctgatgctactcccttctctgtcacacacacacaagtttagtgcagccccatgtgctgttccttgcttacttgcccaacattctacatcttccaagaatctttctctgaaaacctaacacacttattgggcatctactaaagactgtataatagtaccataatgactaagaaatcgtccctctcccctggcaaaaacaaacttaagtggggaatctgacaatgtatggaactaaccagaatactcaaagtttttggattggtacatcaaggttgccattacagagaaagaaagatgcgctatgttgtaagaccattgagatttaaatttaagttttgcttctactcctaatatttaaggtagtgacagaataaaaaaaaagtatgtatttgatgttacagagttttatccacttgtaagaccatttctcacatgaacatttctgaaagaatgttttgttatctaagcatcctgtagttttccctctgaaaagcttccccaaatggaaaagatatggcatttccctcgaaattcctgttagcatgcaagcatatgatggcatgcaggctgatgaggaggcctgaatatggggagactggatttaggaaccatgtggcccatgcttttgatccagaagctgcgattatttctcagtatttccctgttgtactgaattgtataatgtatggaccttttactttctggttgttaccacatttcaatagactgtaccatagatgtatacatccattgggtcatccatctgtagatgttttgttgaatcaaatgactatgtcatttgatgtttctgaaacttcagtcataacaccaccttcataattctttccatattagcattccatctataccatgatttgatatttttcttaattgactcactttttaaaaaaacttaaactgaatataaaaggtaactttatatttattctgtaaatagatttaatatactggtataatttgcccccaaaatataagatatattaatagaaaaaaaggagtccaaaataactcctaaagtctgtctcataccactaatggtgccccgatacaacttggcaacacttacatggaaagcgtcaattgcatacaggtagattgtgcgcacctaaaatgtgatctccctttctcttatcatccaatggtgagcgtgacttgtgagacttatgacatttatccatggattaaacattaaacattaaatgaagccaactgaatgaggtgttacggagtaattttactatacaactcaggttttctcaagtattactattttcaaatactctgcctactatcaaatcttctgttctctaaattcctattttcagattacaatagatattctatactttccaatctatcatgagcatatttcttagagccatattatatatcaactaaatattcaggcctctcaaatatgctgaaattcagtactccagatatgtcaaactaactttttagaaaaaaagaccaggggactgcagtttttacagtttcctgctattctctattgtactctaacgttaatgagaataagacactgaactcctgtagcagttcctcattattgagaaatattgtgttattttccttatctggaggggaattttgaggcaatttctagaggtttcttttattttattacacttactaggaatacagttggattcaaggactttcctactggcatgaaccttgcttggagctacatttcttaattcccaaaggagaagtccggagtattatattttgaaggctttcctatcttcagatttcctacctctttcataaactgtcaggttaggataataataataactactaattattaattacctacatgctaagtagactatactttcttaattatacatcacaacatccctccaaagtagatgtgataataataatttcatacataaagaaagtcaacaatttgttcaaaatttttggacccaggtatatttcattccaaagcttgctcttcatgatgtgtatgtgtgcatgtatgtatgtgtatgtgtgtgtttgtgtgtgtgtgtgtgtgtggaagacagaaagaaaagaggaagagaaagagattaaaaaatgctaccaagtttttggaagtttttaaaattcatccatcctctttagttgtacagtggcaatgaattaatataataaaaatggtgcacgtacattactagtataatgataaacatatttaacagctagaaaatgttagatctttaagatatgcaggattaaacaatctaacttcactgtccttgtttctaatttttaggcactaacttttaggtatcataaacactgtgatgagggcatatatgacaacatcatgagtttgttagccataaaatatgataaggtctttgaccatctcacaacatgagtaatggtagtttcctgttacctatgcaacagatgacattttgattgcctcattaggcaatactggttaataaatgatcattttaaaaggtaacaatacgtgagacctctggtaacgtataaatttcaatatttgtcaacaaattacattggctattaaaaggtacagaatactagtttttaaaactagaataaacatttgtgcatggagtcagtaatgttgacataaaatgaattttgtaattgactttcagaattttgcactaattcaatactggatttcagaagaaaaactatctaatttaaaattttctaagtgctgctgtatttcctttgcattctgcctctcctcttgtccctctttcacatttcttgttcttctttattctaaacttaaatgaatctctgcaaatttaacattattttgaattaaatatttaaattttattaaagaaatacatgtaaataatgtaaacaaagagcaatgagtgtaatatcctcaaactccagcattgattcctgatcccaattcatacacaagaatgagaccctagaaaggtgacagtaagttctaagtgcatgggtgaggcttgtgtactgggagttttactgcagtatcatcaagtgcccagtggggattttttttgcctcttccaaatgttactatttgtaagagattttttcctctggggtatctctatttttctagagaaggatataaatatgcttcctagcattctggtgtgggtaggagaaggacgctgaaggtcttactgacacattgcagacattcatttaattgtcctaaataaagttaaacatacagccatccttctcctactctttgcttagtatcccaaagtctctgtcttccatggagagggatgcaaaatatgttgactacactgaaaaagagtgagggcttatggagaagtgtatataatatacatgttcatacacctgctatatttagaactcttccatcttccaaagtatgttttgggcgactggggcagctcagtttgcttcactttagtattgttctctgatttggttaagtcattgaccttttctcttcctacttctatctttatgtattgtggcttagagtcacagacatctcccagtttcctcaaagatgaaatgtacctttctgttttttgtactaattattggtttgagtgactttttaaagaaaaaaatggcataggaagattgtttctccacagttttaaagctagaaatctataagttctactttaaaacaattttctatgtttatctaagcatacgcatttacaaattttatttatcaaatgactatatgtcaactctctctaagcataggtaaatattaagtattttttattatggtaaaatacacatcacgtaaaattgacattttaaccctttctaagtatactgatcagtggtgtaatgtatattccccctgttgcacaacgattatctccatccatctccagaactttttcatccttccaaatcgacaaccctgtactcattaatagtaacttcctattctcctcttctcccagcccctgacaagcaccatttggctttctgtccgtatgaatttgactactctagatatcttatataggggaatcacaaagattaagttgtaaaggtagattcagaatcacatagccagttatggtctagatgtctcattattaaagaaaaaacaattatggaagcacaaagtttgaagataacaattcacaccttgagaaatcaatgtacttgccttatccatcatcaattctttcaaagtattcacttgactttcatagacaaagtcaagagcaaaaatatctttgcctttaccaacatctggtgtgtgtttttaaaaattattcttctaactattttttttctgtttaaatatatacaaatgttatcagtgcttacccagtctggtcacattataactttagttcttatttcaaatttatagtagcttcctgtatttaatcaagtagttcctaactctatataccaatctcaagggataaagcaaaaatttaaaattaacttacttcaataattcttaaaagacttttgaaagagatgaaacaactggaaagaccacattgccaaatgaagccctagtttctaacactgagataaattgagattttcattaaaataagattggaggctgcgcgcggtggctcatgcctataatcccagcactttgggaggccgagacgggtggatcacctgaggtcaggagtttgagaccagcctggcaaacatggtgaaaccccgtctctactaaaaaaatacaaaacttagctgggtgtggtggcgagcacctgtaatcccagctacttgggaggctgaggcaggagaattgcttcaacttgggaggaggaggttgcagtgagccgagatcgtgtcattggactccaacctgggcgacaagagtgaaactccagctcaaaaaaaaaaaaaaaaaaaaaaaaagatgtgaaaagcagcctgtcaaaaataaatgaacacaagatgtgttttaataataatttagtttctgatgtaatgggaaatgttgaaaattgttttattagaaagtaaactctcatcaggacctttaaatttacatttatttgataacatttttcttgtacatattaaaaatgccaaaataatccaggcaactcaggcagtttctccttgatcacagattacaaataagttttctctaatgtaaaacagctgctctgagaaaaacgcctactatttaggaagggtatgtaggatcaagttaagaagaggcctttggagtcagactgcctggttgcaaatccaaattccaccaatcactagttgtttgattgcaaacaaattatttaaccttccctggcttcagtttcctcagctataaaatggagatagaagagaattttctgaggactaaaaaagacatgtaaaaccttagcaaagtatctagaaaatggtaaggaatcaataaataatatctgctattaaaaataagttttaaaagagtaatcaataagctatggagaaaagcagctttaaaacttaaaaatatatgttactgcactagtatttgatttaaaataattggtttgtgcttttgtcttcctttggatcctgtccccttgactccctttacacatagcttgtgtagttttcctgacttctattttacacatctaaggtttttttctcttatctttggattatctttcaaagatacaaaccttaaaatgtcaaagcctgtgatgaaaaaccttctatagcttcatattccttacaggatcaatttcagccttttttgtgtgttaaataaaaacttctaccatttgggttcaatctgctattcagctttgcccttgataactaatttttcccaccctatattgccaaccacacaatctcacacaccttgccccaaatctgctcactttgtttcccctgcctggggaacctctcacctttctcccacttccctgctaagtatatttcctactctgccttcaagatctagcataagtagcagtaaagcccaactaactccaagacaaactcagaagttcagtctccttggattgattcaatctgggaatatctcaggttaattttgtttattataattattattttataacacatttgcagtatatggcaacacacagtgaacatcacagggggattcaaatcccacagacactgtttagctatcgatttggactctgtaagctttgaaaacacattatctctttaagattcagtaccttcttctacaaaataaggacaatatgcacacctagaatcctcccagggttcctctgggattaaatgagaaaacatgctgtccaatctgcaatcccttgctcttgatcactttcagatctttgcacacgcatttctggcaggattatctttcttttcttttacccctctttttgatcaagagttaaatcaggactacgcctcccatcctgctgctctgcaatctgaattaggtgtctggccatgcaaatctctagatgttcatcctaatttctttcaatttatcagcaccatatggtcatcctctcttcatttggttaactataagccactaactaggaactcctactggaaaggattgttttaccattcttggtagagcacaaggcattatggaggcccaaatagaaacctgggcctccataatgctgtgagtttctttgaaaacagggaatgatgatgagcattttttcatgtgttttttggctgcataaatgtcttcttttgagaagtgtctgttcatcagagaaatgcaaatcaaaaccactatgagatatcatctcacaccagttagaatggcaatcattaaaaagtcaggaaacaacaggtgctggagaggatgtggagaaataggaacacttttacactgttggtgggactgtaaactagttcaaccattgtggaagtcagtgtggcgattcctcagggatctagaactagaaataccatttgacccagccatcccattactgggtatatacccaaatgactataaatcatgctgctataaagacacatgcacatgtatgtttattgcggcattattcacaatagcaaagacttggaaccaacccaaatgtccaacaatgatagactggattaagaaaatgtggcacatatacaccatggaatactatgcagccataaaaaatgatgagttcatgtcctttgtagggacatggatgaaattggaaaccatcattctcagtaaactatcgcaagaacaaaaaaccaaacaccgcatattctcactcataggtgggaattgaacaatgagatcacatggacacaggaaggggaatatcacactctggggactgtggtggggtggggggaggggggagggatagcattgggagatatacctaatgctagatgacgcgttagtgggtgcagtgcaccagcatggcacatgtatacatatgtaactaacctgcacaatgtgcacatgtaccctaaaacttaaagtataataaaaaaaaaaaaaaagaaaacagggaatgaggcttctgcatctttgtattcagaatacctagcacaatatctggcttacaaggtatttgcttaacagcagaataaatctttggtcaacggtggtagataagccctttacagattttcttcctgtgcccttttgtggcatttgcttcatggctggaattagatttcaaaaactgagtcttgcctctttcttgtttttcataagcctctatctctaaaagttactttagatgccttctgtgccaaaaaggagttcctacaatagtgttataattaaaaaaaaaattctcccaaagaaaaaggaactggttgccagggtaaagaaatacactggaagaagtcttatgcaggcactgaaccaacgccagcatcattgataagaagcgaaaaattttttgttaaatatttaggaaaaatggccttaatctggagaaactattatgcaatgtgatattcaacccagacagagtatttgaattctaataggaaccttttggaagctcaattcaaagaaataacttttccaggaagagtttccccacattttggcaggacaatggggagggtgtttgtgtcatcttataaaatctgccaatcagtcaccactgtctatgaatgagatggctgtttctctggatgaaaaggctgcatcctggccagtctttaagaaccttatctggagccactactaagtgttgtccaatctgcaacccctcactctcgattactttcagatctttgcatatgtatctctggcaggattatccttcctttcttttacctctctttttggtaaagatgcattagcacattcgtatttgtatcaaccacatgaagactgtatatccatgtactggatgagaggaccgaagggcactaagtgcttcccctacaagttcagtggatgaaccaggtcagaactcaagcctggctggctccagaagagaaatctgaagatgacaggatgaactcccatttattgattgctcaccatgtgccaggcactgggtaagatgttccacatgttctctcatttaacatttaaaacaaactcacaagctaggtactattatttcttccaccacacagtcaagaaaactgaggtctacaggaagttaagtaccatgccctaggtcttacattaggacttaaacttagattacccaaatgaagcataacctggggaaagcataaccttgagaactaaacaaatcgtattttaagtaacatctcaataggaaattttttaaaacttatttaagcaattctttgaaaagaatggtagaatgggtaaacttattactctggacatggtttttttgtgcacatgacattgaaatcattaaaagttagtcactgtttttattctaggaatcacgactttcaaatatttcaattatttagataccagactgcaagtgtactcaaaagtaactcttgaaaacagtgccattaagcaatgactcctcattctgcacactcacattccctggcaactactaacctgttttgtattctctatggacttacctattctagatatttcattaaaataaaatacaatatgtgatcaaacaagtaacttttggaaaaaatgcatttttactttactatgttggttctttccttggaattaagaccatttattttttatttcaaaaacactttctttggatgtatattttcatttaaagttttctttttggatggagagggaggtggagccatatggctaaatagcagcctcccaaaggaacaacaaattgaacaactctccacacaaaaaagcaccttcatgcaccttcataagaaccaaaaatcagcttaggtaccagcttagccacagcagggtaaagcaccaaaggggttctaggggttcctgattccagggcttggctttagatggtatttctggaccttccctggcttacaggtgggcccactgccccaaaatagattcctaggcctggcagcattcaccacaagctgattgaagagcccctgggccttgaatgaacatcagcagtagccagacagtacttgtcgcaggcctggggcagtggtggccacagggagagactcctctgcttgtggaaaggagaaggaagagtgggaaggactttgtcttgtgacttgggtgccagctcacccaccgtagaatagagtaccggtagattcctaagatttctgactccaggccctggctcctggacgtcatctctagacctgcccaggactaggaggaactagttgtcttgaagggaaggatacaagcctggctggctttaccacctgctgattatagagccctagtgccttgagcaaacataggcaggagccaagcagtggttactgcaggctttgggcaagacccagtgctatgctggcttcaggtctgaccctatgcagtcccagtggtggtggccacaggggtatttgtgttacccctcccccagatccaggaaacagagacacacacagagagagagagagagagacagacagacagacagacagactgagactgaatctgtttgtttgggagaaagtaagagaagagaaaaaagagtctctgcctggtaatccagagaatgactctggatattatccaagactactaaggtggtacctctgcaagagccacagtgttactgggcttggagtgctccctaatgcagatattcctgcagtgacccaaaactcagaccacaacacccaagtttcttcaagcatctggaaagcctcaccaagaaggacaggtacaaacaagcccagactgcaaggctacaataaatacccaactcttcaatgcccagacaacaacgaacatccacaagcataaagcctatccaggaaaacatgacatcaccaaacaaactaaataaggcatcagtgaccagtcctggagagacagagatatgtgaccttttagacagaggaaactcaatggaattcaagataacacacagaaggaattcagaatcctatcagataaattcaacaaagagattaaaataatttaaaagaatcaagcggaaattctggagttaaaacacgcaactgacatactgaaaaatgtctcagagtctcttaacagcacaaaacaatcaagcagaagaaagaactgtgagcttgaagacagcctacttgaaaatacaaagagaagacaaaagaaaaaataataaaaaagaaagaggcattcctagaagacttagaaaatagtctcaaaagggcaaatctaagagttattgaccttaaaaaaaagttagaaagagagatgggggtagaaaatttattcaaagggaaaataacagagaccttcctaaacctagagaaatataacaatattcaagtataataaggttatagaacaccaagcagatataacccaaagaagactagctcaaggcattcaatactcaaactcacaaaggtcaaagataagaaagaatctgaaaagcggcaagaaaaaataaagaaaaaacatacactggagttccaatatatctggcagcagacttctcagtggaaaccttatagggcaggagacatattcacagtgctaaagggaaaaaaacttttatctcaggctagtatatcctgtaaaaatattctccaaacatggagaaatcaagactttcccaaacaaacaaaagctgagggatgtcatcaacaccagacctatcctgtaagaaatgctaaagaattctcttcaatctgaaagaaaagcatattaatgagcaataagaaatcatctggaggaacaaagctcactagcattagtaaatacacagaaaaacacagaatattataacactgttattatagtatgtaaacaactcatatcttaaatagaaagaataaaagataaactgatcaaaaataataactacaactattttttgaaatacagacaatacaataagatataaagacaacagaaagttttaaagcgggggacaaagttaaaatgtagagtttttattggttttccctttgcttgttagtttgtttatgcaatcagtgttaagttgttatcagtttaaaataatgagttacaatatattatttacaagcctcctggtaatcgcaaatcaaaaaatatacaacaggttctcaaaaaataaaaagcaaaaaattaaaacacgccaccagagaaaatcacttttactaaaaggaagacaggaaggacaaaaaccatatgaccatttcaacagatgctgaataagcatttgataaaattcaacatcccttcatgataaaaatcctcaaaaaatcgggtataaaaggaaatacctcaacacaataaaagtcatatataacagactcacagctggtatcatactgaatagggtataactgaagactcttcttccaagaggtgggacaagataaggatgcccactttcaccactagtattcaatatattaataatactggaagtccttgctagaacaatcagaccaaagaaagaaatttgaaaggaagaaggcaaattatcccatttgcagaaaatatgatcttaaatttggaaaaacctgaagattccaccaaaacactattagaactgataaataaattcagcaaagttgtaggatacaaaacaaacatacaaaaattagtagcatttctacatgccaacagtgaacaatctgaaaaagaaatggagaaagtaatcccatttgcaataggtacaaataaaattaagtacctagggttaactaaaccaaaaaagtctacaatgatctatcaactatcaaatactaatggaaaaaaagagaacacaaaaaaatggaaagatattccacattcatgaattggaaggatcaatattgttaaaacgttcatactacccaaagcaatctacagattcaatgtagtccctataaaaataccaaggacattcttcccagaaatagaaaaaaaatcctaaaatttatatgaaactataaaagactcaaaatagccaaaggtatcccgagcaaaaagaacaaaactggaataccagttttgaacccagaaatgaatccatacatctacagcgaactcattttcaacaaaggcgccaagtatatactttgggaaaagacagtctccttaataaatggtgctgggaaaactggatatccacatgcagaagaaggaaactagacttctatcttttgccatatacaaaaatcaagtcaaaatggatgaaagacttaagtctaagactctgaactatgaaactactaaaagaaaacattgaagaaagtctctagaacattggactgggtaacaatttcttaagtaataccctacaagcataggcaaccaaagcaaaaatggacaaatgggacaaataggatcacatcaaattaaaaagcttctgcacagcaaaggaacaattgacaaagtgaagagacaacccacataatgggaggaaatatttgcaaactatccatctgacaagggattaataatcagaatatataagaagctcaaacaactctacaggaaaaaattaatctgatttaaaaataggcaaaacatctgaacacacatttctcaaaagaagacataaaaatggtaaacaagtatatgaaaaggtgctcaacatcattgatcgtcagagaaatgcaaatcaaaactattgtgagatgtcatctcactccagctaaaatggcttttatgcaaaagacaaataataagaaatgctggtgaggatgtaaagaaaagggaaccctggtacacttttgatgggaatgtaaattagtacaaccactatggagaacagtttgaagactcctcaaaagactaaaaatagagctaccatatgatctagcaatcccactgctaagtacatacccaaaagaaagaaagtcaaaatatcaaagagttatctatactcccatgtttattgcagcactattaacaatagccaggatttggaagcaatctaaatttctatcaacaggcaaatagataaagaaaatatggtgcatatatataatgtagtactatttagccataaaaaagaatgaggtcctgtcatctgcaacaatacggatggaagtggagataattatgttaggtgaaataagttactcacagaaacacaaacttcacatgttctccctttttgtgggagctaaaaattaaaacaaacgaaggagatagagagcagaagacagtttccggaggttaggtagggtagcgtggagggaagggtgggatacttagcgggtataaaaaaatgtaattagatagaatcaataagagctaatatttgatagtacaacagggtgactatagttaacaatttattgtatgttttttaagcaattatagggtaaaattggattgtttgtaacataaaaaaaggataaatgcttgaggtgatgcatacccatttaccatgatgtgattattatgcattgtatgtttgtatgtattccacaaatatatacacctactatgtatgcaccaaaattaaaaattaaaaaaagtaaaaagaagttttttttttttttttttgaatggatagcttctgtataagggataggaaagcagacttaactatttaacctgaccttgtatattaatttgtgctcttttggggagaaacacagcctattcattccaggcatgcagtgaatgctaaaaaaatatccacaaacaacatagaacagtgattttcagaagaagggatctagtgtgttctctgtgttcttaaagacagtgctttgtctgatatttttgcaaaaaagttgagtcttaagtatggtgcttggcaaaagttgctttatggaaaatggaaggcaaataagcaaaaagagatcatgccaaaatactccctgttttcagggcagattgttattccatatggggaaagaatatgaaaaagttctcccacccaagaccatgaaatttaagccttcattcagttgacagtcttcagtgagtcagattcctgcaggatttaagttactccctggctgactctcaggcatctctgcagatagttaacctttttcttgttatcttacagcaactataaattcttattagagtgataaaaagcaataacaatttaaaacataagctatttttaaaataacaatcttgcaaataggtagtaccttaagcaaagatgttttaatacctttttaggcctcactacttatatctaacatattaacatggacccactttccacaacgtagattatttttgctatcaacagtctgggaagggtctttataattttgcttttgaaattatgtggctactattaaactcatttaaccaatgactggccttgattttctttgcaatcatccagcatacttggagatacttgtaaaataaaaaactcagcacataagtttttttaatttagtaaaatgttaagaatactcatttgacaattattgaagtcgacataatcttatgctttgaacatttaattaaatgttagtcctcattttgcagttttctgtttgtattcaattacttcattttccaggtctcaaatggtttcatagccccatgagacgctcataggctgtagcccctgaggaatgtagtgcctggtatggaccacagaaccctggaggtgggatctggaaagaaagggaattctggtaagaagtgattcatgcaaggagatgtatttagcatttccagatagtgccctatttcctgtagtaccttgataattatgagttaccttcccttgctaatgagatgaagtaagtcatcaagcatttattgttacaagggttttattcatgatccagctcatacttagtatcatagatgatttttagaaagcataaattgtggttgccagctttgaggacctaaaatttagctgggaagaagaatacaattctccttaatgttttctctggaataactgaacacatgagattgcaagatgatgagtccaaggtttggatatatgaatgaccaaactaaagcaataatatggctttcttaaaaaatacagttatttaaatgattctagttgtgttaaatcattcttttaaatacctggtgagtggcttaggaactaagatagagtctgagaagaatagcattgctggtggccccaccaggatgagagtcattattatgatccaacaaaataggaggatcattaatttttcactcattcccagagatgtagttttgaacagggttaggttcttatttcaattagagaaactagaaccatgaaaagaagatttcagccctaaggaaaacagatatatcagagtttaaaactccgattcccattctgctcaattgctcagtggatatggtcattatttttgttctttgaaatggactttgttttttaagattatgtagaatgcattgtttggcaaaaagcacaggatattcaaacagaggcccaataaccaaatgcattttttctccattgcgttcttacctaaataggaactataataataacaaggcctcagtaatgcagagttcttgcccttctgtaagtgggcagggtgcgtgtgcaggtaggtaggccattaggtcaaatttcaatgtctgagatactctcctgaccccatgggagtcacataccactgaaggcaaaatctggctgcagggtcacctgtgttgcattggaggactgtgagtcatctcttcatactcagctctgcaacagtatgaaaaggtcaccacgaccacgctcacctattctggtgaattagacgtataagcagcctgctcccaactccttggagatcatttctgagaacatttgtcttctcaacctgttgctgggcatgactggaagcagaataaatgactacagaatgtttagtttacccagataaactgcttggcagtctttggattatgtaaaattaattgtggaaacttaatgttgaccagtgatcatagtatgcggacagacctacttagaaactgttttgtgtgtgtgtcagccagtgttactaagaatcatttaagggaatgaagagtaaaactcttttatgtaaggcattagtttagcagggccactgcatctctgtgtgagctgtccattgcccaactctagggagtaccatttttacaaaccacagcatgaattgtgctttcagaattgtgcaaaatggtggccctgtctttctgcatctcaaatggtgacataatgtaactatattttccatctttaaatagatcctgaaagctcaagttgaagcactgaggctgacactctgggctacacagagaaagcagtgtcagatggtggtgaggaacaccttgtaggcagaccgccaaggtataagtcccaacctggcccttactccagccaaattgctttagttttctatgcctcagtctcctcaattgtaaaatgagtgaaatcagagtggctgggagaattacattaaatagtgcaggtaaaatacttgaaagaacaatgcacgcagtcacggactcaatagatgttaactcttaagactgtctctcttttgttcaatcattaggattctggaatgaataaaacattatcacagctgttttactatgattctgctttaggaatatttgtggctgtagaggaaacattttctgtgtgcctttatgaaagctaataactaggaacagtttaatagaatgctcttagagaaaatgaaaaatagaattttgtgacagccattaagagtttaaaagagactgtggtaaggattgtctcttctggatgctttcaaatgtaattattggtgaaggctaatagaaatccatggagtttcagatactgatagaaaatgataggcatttcaaaaataaacattaagcaaaggctacaaaattaacattatacctccccatttatctttttttctctcaggtggcacaaaagcttgacaaagcgtccatgaaccatttgaagatttttgttgggataatcagatatctataaatgccattgtttaagaaagctaaccaaataacgttttactattgactaataaacttttctaataatcttcaattttattttaataaaatattagatgtagttcagtttctcaactctggaatagtgacccaggaaaaatatgagggaaacttgaagtctatggaagttgtatttggtgttaactgaggcctttgtgtcagcccagcacaaactgtaaagtcaaaagtgtgactttctctttctggtcttgacaggcttttgttttgatagacttgtcctcatctttaacctcctactgttcttctaggttatccaggtagctcttcaggtgcccaggttgcctgttgcctctgctagcctgcctagttcgtaacatcaggcagagatgaggcaggaacttcggccctcaggcttgattagtggttataaggccaaggatcataggaaaaaggtatcaccttcagattaccttccctgtgtattctgtttttgtagttttcatcagagagtaagcaaccgtcatgtgaatatcgtgtctttaatgatctgttaaaatggcggctctcagagaaagtgctctccattctcctcctcctacctcaggccccctcagaaatcaggctggtggtgttagggagtgaagtaggctaagtgtaagaaaaaaaaaacaaaaaaaaaaacagctttggaatgctgatggacagcaactcatatttgtcctcagtgtcaggataataaggactcatgggggtgggaaatattgtaaatacaaaccttgaaaggaggtagctgctattcagagagccaacatagccaacgtttctcaattgtacagagaaatgtgaagttatatgtgagatctttccactttcaatcgtgatgctaattcaaaatgaaaaaaaaaaatctgactggcctaacaaaacaagtttggggtcggggtggttactaggtttccttttagccattgtttgggacatactgatgtactgctttattaatctccaagaaactcatttatgttgagtggctaatgcatcagtagggtaatatttactttatattttaatattttataagttaatagatataataaataatagtaaccatacagtgggattagtttccaatggtaaacatttcaggccttcaggccttcaggaggaattttgaattgtgatgaaatggcaagtgcctattccatccaggcataaaaccaatcctagccaatttattaaaaaaaaaatcctgcattgttactctttagctaatgattaactaaagtctgagtgactagtagaatgagtaattttgttacataagccagagaaggtggaaggaaactaacatttattcaatacctactgtccactgggtacttcatctatatattctcttctaatcttcaaaacaacactgtaaggtagttgttacaaataaggaataattacaacttattccttattttgcagctgtaagttgatgtttagagaggtcacatccaagtctcttggaccatgcttcttcattatacaaggaatattgatgttgccaaatattaattcaggagctggtacagttagaaattagtaacacacacacacacacacacacacacgcgtgcatgcacgtaaaaagcaaggttaaactcgcaaggttaggcaaggttagctaccatatgatagcttaaagggaagaattctgtgctgataaatggagtatttttctccttaactgagtcatcctgtgtcattgttaggcactgtagacagtacataagttaactgagatctgatacttccttttatcccttaaaaatccaacacagggctcactgtaattaggtataaataggtgacttaacccttcagatctttctggaggagagataagtgtcttatgagattgaaataggagggatcaacaaagattgcagaagaattaagggctagcaaaatctgtcatgattccaaaaggatcaagttgaaagtgaaactagttcacacattttcacgacagcttcagagttaacatcctataaaggaatctatcaacattgtgacatttgtttaggcttctataagtgagaaaatgtgtccttccatgcaatactaaatgtaattatcatgttatctatttaatccaacttcacataaatcccaatgattaaatctactatctatttagaatattatcacatacttaggaagatatatcaataaatacttatgggtccttgtggtaaataaatactaatgtatagatgaggttatacttgccttagagagtttacaacaaaaagagggacgggtagtgaaagacataatgtccatgaaaaccaccacattattgctttatttgcttcacaggcctcatatgtgaatttttttttaaactatagattcttacctactaaagtaaagtttcagtgagtgcaaaatttgactggcttctatcctcctatgtccccagtacctagaacagtgcctgaacttaggaagcactcaagaaatattgggcaaatgaatgaatgaatgaatgacacagatcatgaatgttataatgagaaagcagagaaaaaaaattatctgggctggatagtcagagaatgtttccaggagaggggatcccaaatatggacttttaaagctgataaaggaaggcaatttccttgagaagaatggcatagacacaaaggctaggtaagggcaaagagacacctggagtaatgtggatttactgttattctatcagtaaatcttgatgaaaagacttgaggccatgtaaagaagaactctctaataaaaatggaatgggttcccttggggttggtaggagaggtgatttctgtgaggggaggtactggagcttggggtagaagaacacaacaaaaatatgatagcaggcagccaaccccaaggcacaagtgaaactttttttttttttttttttttgagacagagtgtcactctgttgtctaggttggagtgcagtgggatgatctcactcactgcagcctctgtctcctgggtgcaagtgattctcatgtctcagcctgccaagtggctgggattacaggtatgcaccaccacaccaggctaatttttgtatttttagtagagatggggtttcaccatgttgaccaggctggtcctgaactcctggcctcaagtgatccacccatttcagtctcccaaagtgctggaattacggtgtgagccaccgtgcctggccataagtgtaacttttaaagtttcctctcaccttgggattccaggcctctcttttggcctggttgctgaaacaatttaggagaatttctgaaaattttcaaagtattcataaatggaactttgctttcctcctcctaaatcaagacaaagctcacactgaccacagattatcttaaatttggtgaaaacatatttcagttggtggaaacacaattgttttgcaagttagctccagaagtggtaattgaaagtgacatttaagaaacattttctatggatctcagaagatgattactcattttgttttgaaggtttatgatatgctaaagtgtttttaaagcacattataattaaacaacttgtaaaaaaaatttaaatttccccctatggaagctcctatttcaaatgtagtctagagagaatttcaagtaaacatgtaactgcacatctgattttgtgataatttgctttatactttttaatatcatctttgatgttacatattcagatgtttaaataccaatacaaaaacaataataattttgtttaaattttccaaacacacaaaacaaagagaagcattcattcaaaatacttgtatacacatgcaaacaaaattaactttgtgtttatgactcacataagggaagttattggtgcccatagcctctgaatacccgcctctcaaagcttattattacaaagaccagtagctccttgcctgaaggtttttaattcctgtgagtcttggcaagggctattttctggctgcagttacatgcctggcctgagcataaataacctgggagtggtggattgttaatgacccccggaagcaggtgatggatgaagagttggtgaaaagcaccccagcttcctcatctcacagttgggataactctggggtctgttccacactgtcttccagaacccaacaatggggactgagctcctgtttccctctgtgggaacggacttgatgatgtgtattttttcagagatccttccatttcctgtctcacttccctactcctttacttaggtttcttgaatttcctaaataaacaactaatattccttatattggggtctactgctgcaggagcctaaaccaatacatgtctcttccattattttgtgacaccaaagaagattttgattaggcctagaaaatatacatgaaagctgatcaaaatgagaggaatgattaggtttgtttgtctgtttttggtaaatatggaaacaatgccatttcattttagtaaattgccaagttttctcaagtccctcctatctttctccatatacttgctcttctgtcatttgccttttttcatctctggcatacatacaacctgaaataaaacgccatggggtagattaacgagaaacactggaataaaaaaaaatgctcgcccaggcgcagtggctcacgcctttaatcccagcactttgggaggccgaggtgggcagatcacctgaggtcaggagtttcagaccagtctggccaacatggcgaaaccctgtctctacaaaaaatacaaaaaaattagccaggcgtggtgtcccgtgcctgtagtcccggctacttgggaggctgaggcaggagaatcgcttgaactcaggaggtggaggttgcagtgagcagagatcacaccactgcactccagcctgggcgacagaaaaagggtctgtctcaaaaaaaaaaaaaaaaaaaaaaaaaaggcttacagtgtcacgtgaatcacatgcttattaaatgaatgaaaaatacactttattatttcatgtgtgtattaagaggtcatatggatagatcagatgttggcaaatgaatgtgttatttctagaagaaatagaaatgtttccttatttgccagggcctaaatcagtgtttctttgaaatgagtatattttctgacagtatacttcatgcagacactcccacacactccccatacatgtgtgtgtgtacctgacttatatcacttaataatatgaacagactgaagataatgtcaattaatcaataataaatcctaaattccgagttaatgtctgtgctgttttgaacaaggtttgaccgtcttaaataaaaagatttttgtgtttgtttgtttttcacaaggtttgaatgtcttaaataaaaagcatctaggagctatagggtgtagagaaaactctccctgatggcatttttcctctactctcacaccacaaaaatcatcaacacagatgaagccttctacgaacaaacatgtgaggtttcccccccacaccaagcagccaacactagctgggtgtcctgtaattcagttccaacgctgtctacctggagataatgtcagatcccaccggttgaaggttcagttcccaagactgccccccaccacaccagtcacaagtgtgggcctctggagcttctaaccggccacctccaagttggcatactcataatcctctctttgggttcaattaatttgctggagtggctcacagaacccaggggaacacttacttatgtttgctagtttattataaaggatattgcaaatgttaccgattaagagatgcatatagggtgaggtatgggggaaggggtgtggagcttccatgccttacctggctgtgccaacctccatgaaagtccaagtgttcagctatgtggaagctcactgaaccctgtccttctgggattttatggaggcttcatgacatcagcattccttcccccagggtatagggcagtactctctctggggaaggtcttaaaagccacaatcagaaaggcaggaacaggtgaaaggagagaaggagaaggtcaggggcctgcccctgaggcctaacacacccaacattataacaaaagactgtaacaagggctgtgggagttatgagctagacctcagatgaaaactaatatatatcataacaccacacatagattcaaagatctaagttaagttggtcattagtcaacactatttaaaagccagatatgtccaaatggctcttgaatctacacttattatagcaaatattttaacgtgtagagatgaaaaggacagattttctttaagtgtctgaagccggtaaagagaatttctgccttttttcctctgtaaatctaaatctgtttgaagaaagaagtgcgctgtgaaatgggaaggcaggggtgggcaaagacacattttagtgaggttttaatctccattttgctgagtagaaatagaaaggagttttgaggtggtttgaagggaaagtgggggagagagagagagaagaaatgggagaaccactgagaaggtttaaaatgtcttcatgttacttaggcagataggcagatatgagcagggtaggagagtgccccaaggaatgtcaggcaacagtcaggtgactgtcatgcaattgtcaggggcctccttgggaatgacagatggtcatggctggcaccaagaaggggaaaatttcctcccaaacaggaaacatcttgagcttatgagcaacaacttcctcataagatcccaggaactaagcaaacatgaccaggcatctgcagtaaggggcaaaatggcggagtttggccttccttcggggatatgtccaggcatgctcaagaaggggcaaaacgtcagagtttgcctgatatgtgaccttcctttgggggcactagaccagtaacgaaaaattgtcatggagagcatacacacaacttcagccaccaaacggcacatgcagcccctgacagatattagcaagttactgcgcatgcaaggattagccaacagttcccccaagaaggatgaggggaggagatcaggaagaatcaggatacagtaactctataaaagccttgaaccaatgatcaagcggggcactcaatcttttaaattttccacttggtcccttccgaatgtactttactttgcttcaataaacttctgacttaaatctattactttttataaaatttttttccataagttattagggtacaggtggtatatttagttatataagtaagttctttagtggtgatttgtgagattttggtgcacccatcacccaagcagtatacactgcaccatatttgtaatcttttatccctcacccccctcccactcttccccccaagtccccaaagtccattgtatcattcttatatctttgtgtcctcatagcttagatcccacatatcagtgagaacatatgatgtttgcttttctattcctgagttacttcacttagaataatagtctccaatctcatccaggtcactgcaaatgctgttaattcattccttttcatagctgtgtagtatttcattgtatatatatctgtacaccacagtttctttatccacttattgactgatggacatttgggttagttccacagttttgcaattgtgaattgtgctgctataaacatacgtgtacaagtgtctttttcaaataatgacttcttttcctctgggtagatacctagtagtgggactgctggatcaagtggtagttctacttttagttctttaaggaatccccacactgtttcccataatggctgtactagtttgcattcccaccagcagtgtagaagtgtttcctgatcaccccttccatgccaacatctactgttttttaaaatttttttattatggccattcttgcagaagtacggtggtatcacattttgtgtttttgatttgcatttccttgatcattagtgatgttgagcattttttcatatgtttgcttgccatttgtatatcttcttttgtgaattgcctactcatgcccttagcctactttttgatgggattgtttgtttttttcttactgatttgtttggggtccttgtagattctggatactaccctttgtcagaggtatagattgtgaagatttttctcccactctgtgggttgtctgtttactctgctgactgttccttttgccctgcaaaagctcgtaaagtttaatgaggtcccagctatttatctttgtttttattgcatttgcttttgggttcttggtcatgaaatccttgcctaagccaatgtctagaagggtttttccaaagttatcttctaaaatttcatagtttcacgtcttaggtttaagcccttaatccatcttgagttgatttttgtatacggtgagagataggatctagtttcattctcctatgtgtggctagccaattatctcagcaccatttgttgaaaaggttatccttttccccactttatgtttttgtttgctttgttgaagatcagttggctgtaagtatttgggtttatctccgggttctctattctgttccattggtctatatgtctatttttataccagtaccatgccattttggtgactatggccttatagtataatttgaaatcaggtagtgtgatgcctccagatttgtactttttgcttggtcttgctttggctatgcaggctcttttttggttccatctgagttttagaattgttttttctaattctgtgaagaatgatggtgttattttgatggggattgtgttgaatttgtaggttgcttttggcagtatgggcattttcacaatattgattctacccatccatgatcacgggatgtgttcccatttgtttgtattgtctatgattcctttcagcagtgttttgtagttttccttgtagaagtctctcgactcctttgttaggtatattcttaagtattttattttattttttttacagctattgtaaaatgggttgagttcttgatttgattctccccttggtcactgttggtatatagaagagctactgatttgtgtacattaatcttgtatccagaaactttcttgaattcatttatcagttctaggagcttgctggaggagttcttagagttttcaaggtaaataatcatatcatcagcaaacagtgacagtttgacttcctctttaccgatttggatgccctttatttctccctcttgtctgattgctcttgctaggacttccattactatgttgaagaagagtggtgagagtgggcatcattgtcttgttccagttctcagagggaattctttcaacttttccccattcagtattacgttggctgtgggtttgtcatagatagtttttattacattaatgtatgtcccttgtatgctgattttgctgagagctttaatcataaagggatgctggattttgttgaatgctttttctgcatctattgagatgatcatggaatttttgtttttaattctgtttatgtggtgtatcacatttattgacttgtgtacattaaaccatctctgcacccctggtatgaaacccacttgatcatggtggattatctttttgatatgttgttggattcagtcagctagtattttgttaaggattttaccatctatgtttatcaaggatattgatctgtagttttcttttttggttatgtcctttcctggttttggtactagggtgatgctggcttcatagaacgaattagggaaggttccttctttctctatcttgtggaatagtgtcaaaaggattggtaccaattctttgaatgtctggtagaatgctgctgtgaatctgtcgggtcttggacttctttttgttgataattttttaagtaccatttcaatctctctgcttgttattgatctgttcagtgtatctaattcttcctgatttaagctaggagtgttgtatttttccaggaatttatccatctcttctaggttttctagtttatgtgcataaaggtgttcatagtagccttgaatatcttttgtatttcagtggtgtcagttgtaatatctcctgtttcatttcttagtgaagttatttggattttctctcttcttttcttggttaatcttgctaatggtctatcaattttatttattttctcaaagaaccaggttttgtttcatttatttatttatttttttgtatggtttttttttgtttcaatttcatttagttctgctctgatcttgattatttcctttcttctgctgggtttgggtttggtttgttcttgtttctagatccctgaggtgtgactgtagattgtcttttttgctctttcagtctttttgatgtaggcatttagggctatgaactttcctcttagcaccacctttgctgtatcccagaggttttgataagttgtgtcattattgttgttcagttcaaataattgtataatttccatcttgatttcatttttgacacaatgctcattcaggagcaggttatttaatttccatgtatttgcatggttttgaagattccatttggagttgatttccagttttattccactgtggtctgacagagtgcttgatataattcaattttcttaaattcactaaggctcattttatggcctatcatatggtctatcttggagaaagttccatgcactgttgaatagaatgtatattttgcagttgttctgtatatatctgttaagtccatttgttccaaggtacagtttaaatccattgtttctttgttgactttttgtcttgatgacctgtctagtgctgtcagtgaagtactgaagtcccccactattgttgtgttgctgtctatctcatttcttaggtctgttagtaattgttttataaatttgggggctccattgttaagtgaatatatgtttagcattgtgacatattcctgttggagaaggccttttaccattatataatatccctctttgtctcttttaactgctattgctttaaagtttgttttgtgtgacacaagaatagctacctctgctggcttttggtgtccatttgcatggaaagtcttttccacccctttactttaagtttatgttggtccttatgtgttaggtgagtctcctgaaggcagcagatagttggttggtgagttcttatccattctgcagttctgcatcttttaagtggagcatttaggccatttacattcaatgtcagtatcgaaatgtgaggtaccattgcattcatcatgctctttgttgcctgtatacttttgttttgttttgttttcgctttttagcttgtatttttgttttacaggtcctttgtgatttacgctttaaagaggttctgtgcaaaaatcacaagcattcttatacaccaataacagacaaacagagagccaaatcatcagtaaactcccattcacaattgcttcaaagagaataaaatacctatgaatccaacttacaagcaacatgaaggacttcttcaaggagaactgcaaaccactgctcaatgaaataaaagaggatacaaacaaatggaagaacattccatgctcatgggtaggaagaatcaatatcgtgaaaatggccgtattgcccaaggtaatttaaagattcaatgccatccccatcaagctacccatgactttcttcacagaattggaaaaaactactttaaagttcatatggaaccaaaaaagagcctgcatcaccaagtcaaacctaagccaaaagaacaaagctggaggcatcacgctacctgacttcaaactatactacaaggctacagtaaccaaaacagcatggtactggtaccaaaacagagatatagatcaatggaacagaacagagccctcagaaataatgccgcatatctacaactatctgatctttgacaaacctgagaaaaacaagcaatggggaaaggattccctatttaataaacggttctgggaaaactggctagccatatttagaaagctgaaactggatcccttccttacaccttatacaaaaattaattcaagatggattaaagacttacatgttagacctaaaaccataaaaaccctagaagaaaacccaggcattaccattcaggacacaggcatgggcaaggacttcacgtctaaaacaccaaaagcaatggcaacaaaagccaaaattgataaatgggatctaattaaactaaagagcttctgcacagcaaaagaaactaccatcagagtgaacaggcaacctacaaaatgggagaaaattttcgcaacctactcatctgacaaagggctaacatccagaatctacaatgaactcaaacaaattcacaagaaaaaaacaaacaaccccatcagaaagtgggcgaaggatatgaacagacacttctcaaaagaagacatttatgcagccaaaaaacacatgaaaaaatgctcaccatcactggccatcagagaaatgcaaatcaaaaccacaatgagataccatctcacatcagttagaatggcaatcattcaaaagtcaggaaacaacaggtgctggagaggatgtggagaaataggaatacttttacactgttggtgggactgtcaactagttcaaccattgtggaagtcagtgtggcgattcctcagggatctagaactagaaataccatttgacccagccatcccattaccgggtatatacccaaaggactataaatcatgctgctataaagacacatgcacacgtatgtttattgcggcactattcacaatagcaaagacttggaaccaatccaaatgtccaacaatgatagactggattaagaaaatgtggcacatatacaccatggaaagctatgcagccataaaaaatgatgagttcatgtcctttgtagggacatggatgaaattggaaatcatcattctcagtaaactatcgcaagaacaaaaaaccaaacaccgcatgttctcactcataggtgggaattgaacaatgagaacacatggacacaggaaggggaacatcacactctggggactgttgtggggtggggggaagggggagggatagcattaggagatatacctaatgctaaatgacgagttaatgggtgcagcacaccggcatggcacatgtaccctaaaacttaaagtataataataataatttaaaaaaaaaagaggttctgttttgttgtgtttccaggatttgtttcaagatttagagctccttctagcagttcttgtagtggtggcttggtaatggcaaattttctcagcatttgtttttctgaaaaagactgtatctttccttcatatatgatgcttaatttcactgggtacaaaattcttggctgataattgttttgtttgaggaggctgaagatagggccccagtcccttctagcttgtaggctttctgctgagaaatctgctgttaatctcacagattttcctttataggttaccagtgcctgttctggtgcagggggtaggggttggggggcgcaatgggctctgtgggggttcttagctttcgtggtttaatgctctatttttgtgctggctggtctcctgccaggaggtgttgccttccagagagcatcagctgtggtagtatggggaggaaccctagaactcccaagattatatgccctttgtcttccactcccagggtagatagggaaggaccatcaggtgggggcaaggctaggtgtgtctgagctcagactctccttgggtgagtcttgctagggctgctatgggggatgggggtgagattcccaggtcactggagttgtgcacctaggaggattatggcttcctctgctgagtcatgcaggttgtcagggaagtgggggaaagccagcagtcacaggcctcactctgcttccacgcaaacccaaaccaaatggctagtctcactctcactgtgtctcccaccctctaacagcctgagtccattttcagttggagggcaagatgagcttgaaaatctgccccaggctacccacctcccagctgtgaatgaaagggattggttctactccacctgtggagtctgcacgccagatgtgtgccctcccctgagttctggccaggaggcttctcaccccattcaaattgttacaaacttcagctagagattttcttctccctgtagagttttaccccttgcacctctggctctggctgccctctggatggatccctgtgatgccaggcatggatggcctgctaggggactcagagagcttccagggcctttctgctactttctttgcctctgtatttcactcagctctccacattgactcagctccaggtaaagtcagaaacttctcttgcaaacagaccttcagcttctccagtgggggtgtgtgttcaggagaggagggtctccctttcccacttccacagttggggtactcacagtatttggggtgtttcccaggtcctgcaagagcagtctgcttccttcagagggtgtgtgggtcctctcaaggttgctggtttgttcttgcagtcaatctggagctataattcacaatgcgagcctccacatgctgctctgtccagagctgcaatctagtcctgcctcctgtctgccatcttaaatctacttctgtctcttggatgtattttttcttctcagacaataagaaccaaagactgtgtatcctgcccaaacccgctgccagtaacattttggtgtcatgaatcagattgcagcttctcggtaagaccctctgtgccttgccatctttggctggaggcacccaactctgcttacgtgaggtcttctttctcttgctgtctcactcaccagcccatctccagaaaaattctctttggtcactcttccctctagcagattcctcagttcatcctggtgggcgacagcagaggtggaggacttcagagtctgtactgagtagacctaagtcactgtggcccttttggacaggtggctcacaagggtgatagggcttgagcctaggccattcaaagactggagaccttcatttccttaaccaaagtggacttttccccaataagtctacaccctattatgcttcctttttttctgtggactttgagatggccttatatgctggccacactgtctgtcttgggggcaagtcaacctcttccctgcttctattctgcatatcatgcaacttctttctctgcttaatattgggaagactctgtctccaccaattctttatttcctatcatgaatttttaaatcctgctacacattgagaccaggttttccagtggctcttgaggtcatttgtttgtctccatagggcatctgtatgtggtccattaagagcaactcctacttcctttctagagctatctgcactttggggagaggacaattctttctctgccttttgtggtctctcatcccaaactccctggccctgacagttcttcctctacactgagaagactgataggcaatgtcctcttaggtctaagggctgctgtttgtgagactgtacaaaagcagccttccatgaatatcccttattttctaccattcccacgggtggcagatggattgtcctgtcattttaaatacttgttttccatgcttccccaggaatccacaggagggatgacaaggggactcagatgcaggttttcctctgttcctctgaccatctacattcttaacatatactgggacctacagtgctatgtccagagaaaggaaggcccagttcccttacagctgctggctagggataagatcctcacctacctaaagggatatggagaatgggaatttgagagaaaggaaaaccatttcattgctggaatgctccaaacaaaggtcactgtaagatcacagtgtcaaaggtacaggtcagccagaggccacaggtgcaggacagattaccattagcagagagatgaaggctggtcctggagggaaatgtgggaccagggttagtggtacctggtaatcactggtttattccagaactccaggatgaatgggggatgccctactcactactctgatccaaggtataaggggatcaggaaggaatgctttcagctgggcgtggtggctcatgcttataattccagcactttatgaggccaaggcgggtggatcacctgagttcaggacaaaaccccgtctctactaaaaatacaaaaattagctgggcttggtggtatgcatctgtagtcccagctcctcggaaggctgaggcacaagcatcacttgaacccaggaagtagaggttgcaatgagctgagattgcaccactgcactccagctgagcaacagagagagactctgtctcaaaaaaaaaaaaaaaaaaaaaaaaaaacagaaaaagaaaaaagatgaagaagaagggactctttcctcttccttactcttccctgttctgtcttgcagatagataacggtgtctccatactctgggactgaccccttggatgcatccttaaaatctgcgataaatccaaccaccaaaccctaaaatgaaaaaactaatttttcattgcagaggaagtctggctagagaatggaagtacaaattttaataccattctccggctagaccttttctgccattatcagggcaaaaagccagaggtcccctatttacaaacctttatggcctaaagggaagaccctaatcctcgtaaagcttgtaaggcaaacctcacatcctagctatgcttagccatctcctccagggccctgcatcggccctggagactcctctgctgattcctctccaacatttcttcctccagaagccaaaaggaaaaactacctcctcctttggaggtgaaagagggagaaacagccacccctggatcctccccctatttatcccactcccagacctttggaattggccccactttacaccgggctccttagttctcctctccaagcttgtaggaggtaagtgagccaactgaactcgtccaggtccagatccccttttccatgtacgacttttgacaacttaggaaaaacctaaaaaagttctcagatgaccccaaaaggctcatagagggcttccccaaattggctcttacatttagattaatttggaaggacataaatgtactcctgggacaagcccttttacaagaggaaagacagaccatctgcggagcagcaatccactgtcgaaatgacttacacctggaaaatgccaactaccctggaggggctacagctgttccccagctggaccccaatcaggactacaatgccaaagcgggaatatgggccaggaaccataggctcttgtgtctaatagaggtaataaaatgaagtaagatcaagcctctaaactacaataattagccaccataaaccaggggccaaatggaaatcctatagcctttctgaaaagtctacaggaaacttattaagcacaccaaacttaaacccagaatctcctgagggactagtcctaaaggacaatttacccaagctgctccagacattaggaaaatttacaaaagtcagccttagaacccagtgcccctatgccacaaatcctcaaattagcctcctcagtcttttataactgagatctggacaaggaggacagggctaaggaaaaggagaaatgcagggacaagatgcaggctcaactattggctgctttacaagcccaccagccccctccagggtctcctaaggaccctcctccaggtaactgccactgatgcagaagaccaggctactggagaaggaattttccaaatgggccaaatgggaggaagccccacacagcctgccctctttgtgataagctggagataagtcccactggaagagggactgccctgggatccaaaaggtcccccagttgaacccccatccaataatggccttgagctgaaggggccctccactctggccagcttccaaatcagacatcatcattaaaggaacagagccaagggaaactctggaaatgacaggtagtgctataaatatccttttaaatacaagaactgcctactttgtgctaacctttttctctaggcaacttacccccaaattctgttgggtaacaggagcaagtagcaaccccttcctctaaagattcacatcccctttatttatattgcttatgggactaattactattctcccactagtccctggcaatgtctaaatgcctcacactgcttttgagtaggaatatactttccaaaatgggtatccacttaatatttacccaacatctggactgatatttccccctaatatcccagtttctcccaggaaagccagcagtcctacctcagggttttagagatgccccacacttatttggacaagacccagcaaagaaatctaaccaagctatatcttgagtggggacaacttctgctgtatgtagatggcttactcatctgctccccctccataaagcttgcacaacaatatgcagtacaaaccttaaccttcctagcaaaatgtaaggtacaaagtatccaaatccaagacagagaatttcatacctagaaccaaatatatatacagagagtactgctggctccagaccctctaacaaccaacttgtgtacccacccaggtccttattaaaacctaaagtgatggatctacaaaatctcaactaatcccctcatggaaaggcccttttactgttttcctttccactgcaacagctatcaaagttcctggcacctctagttggatacatcattcctaaataaaaccttgagaggcttctgaacaatcaacaataggaccagcacctgagtattcctgtgagtcattggaagatctataatatctctttcaatgaaattataagtaatgccttcttttctttcaaactaatgctagctcagcataaggtagccccagtactctggatcttattcatggtgggattgcttatgcttacacttggttcaaaaccaacattcccgagtgggcctacacccctccaggctatgtatttttatatggacctaaacaaaataaactgccctgtgagggaagttctaaaagaacttattcaaccccctcacttgtaaacctttttatctgcatagataacacccaacatacaggggatgtgccctaggactcctggggccacaaggaacaggtgtaaccatctataacattacaaattcttaaaaaaggagagctcttggccttataatggtagggctaggggctgccataggattagctgccccatacagaggattcagttatcataaagtcaccctccaaaacctctctacacaaattggagacctaggtcagagaactgggaacagaatctctaaactcaaggcttcactgaattcagtagctaatgcagtcatggacaacagactagctctagattacctccttgcagaacagagtcgtctgtgctgtcatcaataaaccctattgcacttgtgtcaacaatagtgggcaagtagaggaacatataaagagaatctgtgaccacgctaagtggcttcatgactctgggaaagaaaatccctcagcagattccatctggaactctgtaaaatctgctctcccattgctcacatggttcctcccctgctcgaaccagctgtctccatacgtctacttctttttggcccctgccttttaacctactagataaatttgtcttctccaggatataacaatttcaaaccaagttcccaataatgcaggtgatagatgcaggaggcagataagagggaggatccctggagaatctcccgcccgcctgtgcactgcgacgatggggtaaagctaccaggaagttcatgccttgttggggggaaagagcctgggaactttagctcgtgtgtgggggcttggaatccaatctgtgagatgggagcctgctggcagaaacccctctcactttgctgaaagtttttcttttcttgttttccttttcgcccaataaataataaattccattcccctcacccttccacgtgtctgcatgcctaacttttcctggtcgtgacacagaacctggatttagctgaactgaggagcagaaattctgcaatacaggaatatctacctccctacccaaatgtgaagaaaacatacacctgtttcccctggacctggctggacaccaattctacctaccgatgggaccattctgttctgacaattagcaagagattgagacccagaggacaaatacagcccttatttcagcaggaagcagccacagaggactgaccttcatccactagccccaaataattgagtctcacactcttgaggggggaatatgttagggtaggtagataggtggatatgagcagggcaggatagggccccaaggaatgtcaggagacagtcaaatgactgtcattgtgactgtcaggtggcctcttcaggaatgatagatggtcatggctggcaccagggagggggaaatttcctaacaggaaacatcttaagcttgtaggcaacaactttgcgataaaaccctaggaattgagcaggcatgcacagtaaggggcaaaatggcaaagtttgactggtatatgaccttcctctgggggcactagaccagtaaaggaaaattgcccaaagagtacatgtgcataactacaaccaccaaatggcgcatgcagcccctcccagattactggcaagtcactgagcacgcggcgattagccaacagctggcccaaaaggaagtatgatgggaggagatcaggaagaatcaggaaatagtaactttataagagtcctgagccaataatcaggcgggacactcaatctttccagttgcccacttggtcccttccaaatgtactttgcttcaataaacttttgcttctgtctgaaatctacatctgtctctcagctgaatttttttcttccaggaagacaaaaactgagggccgtagaccctgcctggactcacctcccgtaacatttagactctttatttcacttaaatacttgatcaagaggtacatgaagataacaagctatggggctttgcaataataaaggcagattgccagtctgagtttggaattggaatcggtatagacataagattcatgaaatttcaaaaatgacatatttctttacatgtttatgatcatgaaaactagtctttctgtttaaaagaaactacctgggttcctttagtctttgaacatagaactttttttttaatgttacattgatagctgaaacagttgataatcatgttctagagcaggtgagtgttgctatatactggggttgagatggggaaaatgaaataaatgtataaaggatcagaactacagcatcttaaagtgaaaacatcacaaagctcagagtaaatttccatcttgctgttgatttatatataaactgtactcacatgttcagaaggagaagtggaaatattatcttggcttacatggaagaggaaaagactatatctagttatttaaaactacctgttaacttacccacagacacagctctatgtaatgaactctagaatgtggttagtgtcaatgttccagttgtggacggaggaaacagttttcaccaaatgtagttgacaatggctgtgaaacatggcacagtgactagaatgaggtaaacagatgtcataataaccacgggacacctgccttcttcacctctatgaaaatattgctgccttacacatgggcagaggtggagaaatgagaaattctgtccttagacacttcactccaaaacctgccaggttcaagtgctgccttcctgtctcaatggagaatttccagttctactctagggatgaggctgtggtctctccagaggtgggtcatggcctcagtactataggcaggcactacatcctgcagctgtcaatccaggctgataatttgagacctagcagctgatgacattccttctctgcatggcagttgtctctaacaggccagtgcacatctgagccaaagatgacatttttggcatttgcctagacgttgagagcatccactggcttggtgggcaccagttggcaagaagggaaaaccccagccaaggaaagttttaagaaggccacgtgctggcccttcagaagcagctgcattcatagtacacactaggggaggcaaacgtgtgcctgtgtaatctgccttcttcactcagtgggagggaggccagttaacaatgatttcaactctttattaaaatcaactaacacattgctgcacttagatagtagtaaccaggcaggacaccagcaggcttccctaactgcctttttattacaagacctatttcaggcccatcccactttacatctctgcagcatgacttcccaaattacaggcataataaactaacaaaggccacaacccctgcaggcatacagagtcagattacgtctgactgaatctgctttctctattcataaacaacttaaaacagctctttccctcgcgtaagaacctgacttgccaggcacacagtgaaccagcagaagactacatgaggacaatggagatatgggtgagacaagggcaggagatgccttgttcataggaaatgaaaagctctaaagcccaaagaatttcccttaattttttccacgcagttcccttgaggttatgcagctggatgttctcagagctgagagtggactggcttactataaactattcattctaccttcagatactttcaggccctctgttacgatggttgactcaattgttcctcaaaccaaagcttatgcatgtctaagttctctgatcttaaccttttgaaaggcagtaaaatgaaagaccttatgaacttttgtttgtccgtgatcttacttcctccttttaagatagttttccttatgtaaaagaagcatggagtaattgactttggacaagtgacagagaaagggatggatttctaacttaactgttggcatataccttgagaatgaatacataatacacgttttagtataagccacagattcctctggtctgggtacactggaggcatttttataaatgtaacatggtttattgacaaattcagggaattgtttcacattggtcttttctgtcataccagaggaagttttagactaaaaataatattatccatgttttacagataagcaaattgaggtggagtacagttaaagagcttgcttaggtcacatagctagggacaaatccctattaaatggaaaggatatgagactgaattagtttgccatgcagtaattaaaatcacaaagttctgtacaatctccttgatttttaaaagaaaaagttgtctgtttcatgaaggacagctacttacagaatatatgcaatagggttaagttgaaattgtttcaaatacacaaaagaagccattttttaaaaaaagggttctgaaaggggtgaaaatattctgttagtcaacgaagcagaccacaatagtacatttatagacagattagaatttatggaaagagaaaataaattaaaaatatgaaaaatgttaaacataattgtgttacggtggtagaataataggcaagattttttttaacttcttttttcacaatctctggatgcatgctgtttttgtaattagcaactgtgtgttaaagaaataaactacgtaagcagcccctttctgcacaagatggctgctatgttatagaagtctagttcaatttatacacaggtgaatttttctaatcttttattttataaacaacgatttggaaaattcttttatcttaataaaaaaaagaccatagcccttctgttcattgcaggcagtctttagttaagacaatacacacaggaaaaggaacaggttatcaaacatgaaaggtatttagttaaaaaatcaagtccctgctttcaaaatgctcataatctaaggagattcaagttaagctcatcatagagctgtgtgcagtatccttaaactacatgctaatttcaaatatgagagagtacatatatatgtgtgtgtgtgtgtgtgtgtgtgtgtgtgtgtgttttcccaagacctttctccttccctatttaaaacaataacattttgtcaagggaaaataaacaaaataaaatagtttgaggttgacccaaaactctgaatatttgaattctaatttgattctaaagtcagaaaaaaagtctactctcctggtataatacttttaaagcaaatggaatccatcatgcatgaaaaactaatctctgacctttaatggtaattttactgattgaaaaaagtttcaaacactcagttgtgggaaggaaacagacatttgctcacagtctgcagactttggctcagctgacagtaattttccattgattgggagaaaatcatggaaattacatagctatggctggctttagactggtcttatgtaaatttcaaccttaattctgtgtttattcttttgtgtgagtgaaataacaacagagtctctataaaaagatgttactaatatatctgaggtgacctataactactatgcatgatatagttatgtcttttggattaactatatattttatgcatttataatacttatacatgcacagttaaaattcttttaggaaaagcaataaggtactctgttctgaaattgtttctacaaatgctgcagtatgagtttttcaatgacttaaaaatttccatatgaggagaagtgttagaaatgtatttttccaaatgcaggtgggaggacatcttctaagcctcaagccagttctacaggaaccaagacaaacaccgaaaagtgaaataagattaagtctctgcaccatttctaaagcagtgaagcaaaactaccttcaagggtcagtggagaagacacccagtccacagccatagatgctaggatagtcttggtcacatccccagccataccttattgagtcttggtggttgaccctgagctctcatgttctagagttccataatagccaggcttccaaatgcaaaaagtgtgtgtgtgtgcacgcgcatgcatgtgcgtgtgcaggtgtgtttaggcaaattcacttaataaaaatgggatgctgataaggtgagaaaaacactagccagacagcctaaatgaacagtaaaacacttagaatcgtgcctaacttagaatagtgcctggcacttagtctggaaacacaggctatacataatatcaggaaggacatcttcggtccgttaagatatataataactatgttttcagactttatagaaccctgtattttcataggtataagttaccatttatgagaaacccatacacaggaggaaaataaagtgaacaattttaatcataacaacttactgagttttaacttcaaagcgtgtacttatatttatacttatttgatgtaattcattacccatattttgtcagcagcaacttgtaaaaactttaaatgaactactatattgtcaatcattgctttaaaatctcaaaatcatttcatgaatacagcacattaatatatgacaagattgaaaaaagttatataaaatctgattgagggcataatttgttaataactctaggcttttaaaaattgtgaacttagagcaccgctatttccctttcaaatctccctctctcacctcctttcctcctctactccttcttttcttttcttccttctttccttctcattattcaccaacgaacccaccaaccaatcagcaacaattatttgttgaagctttttgttgttttctcattaagataaaccaattaagtaatctattttttctattgataaatttgtttatagaaaataattttaaagtattcaatttctaaagtcggttgctctaaagacccatccttggagaaatccaatgatttcctgcacttaacactgggatgaaacacagggcccagggacattcatattaaacttgaactgactccatctgtactttgttcagtctgtttattgtgcttctattgagttttcattctctcagtctgatttcctttctgctcctgttccaccaacatggcaccctgagggcttttctccatacatcagacatgttacctggcctatgtctttccctcgctccctgagatggcattcttggaacctggcattgaacagggccttcctcctataatgtgtaatgataatcctccaatctactgccctgcctagacaagatttttatgcttagggttggaatcaagtttttcaagcacaacccctgtgacagctaatatttaagggtctcagcagaatttaatttgtaaagaactaaatataaatatacttcttaaatctggcatcttgctcatcttcttgcctttgtgttctccctgttcttttttcctttctttcaaattatctcctgcaacattaagaaaagtgtggaatggaaaagtagtcataaaaagaaagctagagtttggctctgaaatgtctatgagatggtgtgaaaaggcgcctcaggactgaactgtgcctggaaaggcaactttttcttcactatatgcagccttcctgagtcactggtcactgctagcagcacagaagccacagaatgaaaggagagcaagtgctgagtgtaatatgggaattatagagaaacagggagtgagttcttctgttgtactgtatgaccatgtcaccggtccctcttaaaagataatctaaaaatagagtacacgcatgcgcacttgtgcacacacactataaggtctgctcaagtactaggattatttgggcttgaggatttttggattgattgaatacaactttatttatgtatccttgattcaggaataaaaaaatggctaaaatcttttgctacatagcaattagagatttagggataacataatctgaggatgtcttcaagtctcagatatgtaacttagctgtgcaatcttaggaaaattatgcctctttcatgggccacataaattctcaggactaattaagacacactattggcacaataaccagcaaaatgccttagtttggtttttataagtgtgctggatttttggaagaagtccaataactacatactaaggaaaatagttcaatcattttttattgctttagttcttatcattcactcagtattgctggtgattgagggaacataaacctctagaggaatgaactgataccactgcatgagaccaaaggcaactaatcatgaaatgagacagtcctgaagtaactggttctgattctgaccaagcaacccaatgagtagtttatgggctcatgtcatccctttgaaaagcacaaataaagagcaaagaaaggaggtcacacaaatggaggttactctcctgagtttgtcaagaagctcattgggcactccatagttgggaacactggtattctagaatctttatggcttatgggtcaaatccaatgctatctatatttacattatgttttaggcattgcagcatatattcaccatccttttcttcctcatgctctcctccctcagtgatattgggtttagtcacattatgtgctgtggctaacagaatgtgggcacaaatgatactgctttataaactgaggccttacaaagtattgaacatttctacttgccacattgggagttgtaaactgtgccacaaggacacgccctgggagatcactggtccaagaaggagaaacatgaagaacaagcatgaaggcaacctgcagcctgaagcagcactattctgacccattagtaggactatgagcaagaagcaaatgtcattggtattttgtagttgattgttcggtagcattactgtagcaatagctgactaatgcaccttgcaataatagatcaacacagaaaatgtgaattttgtttttctcttggaatctcaacagttctgactaattcaactaatccctaacctttctattttattttgcctattcaagcttgctagcaatctagactgttatcattccttaaatatgcttcatgtagtgtacagtgcctccaccctcgacaattcccatctgtctaatctttttatgcaagattcaactaaaatttttttctttcatgaagaacatcagattctcccactaattctttctgagagagaggcaatttcttctttaagctcttttatctctctctcttgctttattgatgaccatctgtgataaattatagtacccctagtattgttctataccacttattggttaatatatcccttggcatttgaaaatgctttaaggactggaatacttctcttgaatttcatacagaataagcccttcattagttacaatttaaattaattcactccccttgcccccagtctgcttcttctttggatatcctaactcagtaaatgtcattcccatcctcctagttgtccaagccagaaatgtgagtgattattaatccctatttctcttacctattaaccaagtcctgtttagtcaaaacccctaaacatcaatcaaacctattcacctctctccagccccactgacattatcttaaagcccttcaccactctttcctggaatattgtaattgattctcacatgttctacctacttttggtcttgaagatttgcaatccaatttcccacagcagccaaagacattttttttttgaagtgcatatttaattatgtcatttgctgcttaaaatatttcactggctccccactgcagcagaataaagtagaaatttctatgtgacttatcagatcttttatgatctacagtttacctctatagccctatttctgactgactccccaacttatgctctataccttaggccaactaatttttctgcatctccccaaacctaccacattttatcttattcccagtcatttgcacatgatactgtgtctacctgataccctctctctccttccaccaccctttccttggctatctcctcttgagctttatatctcagatcagataacattttcattaaaagcccactctggcattcctctctccctcttgctcaagcaagcatggccaggggcccttcttgcgtgttcctacagcatcctgcatttacatgtttccctgtagcacttatgatactatagtttctgatttacttgtagttgactctatgggtagcctacccaagagccattccttcctactaggcccccagtgaaattcaaatatccacctacccttgcagccacatacttacagggaggtgggcctcagccccagccaccatgagggaaacctgattgtctcagctaatcatgaaagtacgatttccaaggcagtgatttgttaagacatcggcatgtgaaaccattttggccaataagacattgaagggaagtgggacaaggggagaccatctggaaatgattttttttctttcttaaaagaagacgtaaaaagaagatcctcttttctgactggccatagttatctgcatgtaataggtggacctgtgacagacatctcgagtttacaggaacaaaccagaaaactcaccaacacttgaggctggcagaagagaaagatgaaaaagactcaggccgcctttgataatgtcactgagtgacttggagcctcccacctcaggatggctttggtttaagccagttaagttacaactttctggcagttacagctgcaagcattctcactgactgacacatgtctatcttcctcactgtactgattattaatgagaatttatgcttggagatggaactgcaaaggaactaagaactaaagaaaacatcttagaaggctgcatggcatcatggtaattaatagggaaaactttattaatgtggcatcatatagagaatcagaatcagcttttgaggaaaaggatgtagaagtcttctgatttattttctgggccagagaataaaatggaacagtaatagccttttgaaaagctaggtttaagatgatcacagaaatcctactgtaccaaattcagaagcctctagaaaagtgacctaattcagtttctgctgtgctctgccccttgctgttcactttcctatctcagctctggttttacttcaaaagctcaggaacttaaaagggggaaacctaacaacatatttacctaaactctgatcaaagatccaagaaaaggtcaaggtgatagctgaacccacaattatattaaccttttgtggaaacattgaacaatgcagtagtatctttgcttctgcagaatatcttgttagaaacaggaatttcaagaatagccagaaagataaatcttcttgctacctacgtttttacgctttaaatagtaaatgcatagcaaaaggacctacacagtagtgtattaaacagtgacacctttgtatttatcaataacagaactctcaatattcataaggaaatgtaagataatatggataaccaagattattgcttgagcatattctttaaaaattggcagacagttcaagctcctatagtgctgcaaatggaacttattgtatacttatagttacttgtaaaatgagataattcgtataaggtagaagttacccctcccttgaaagtttggtagaacttgtatgtagaattatttgagccagtactattgacagtctgcttattcactaatttctatgtgtggaggggtaggggtgtctaaaattgtaactattgatgcaatctgtcaaattgtataggtctactctagattttttttttaaatgtgttgagtcacaatgataaactagattaagaaaatgtggcacatatacaccatggaatgctatgcagccataaaaaatgatgagttcatgtcctttgtagggacatggatgaagctggaaactatcattctcagcaaactatcgcaaggacagaaaaccaaacaccgcatgttctcactcataggtgggaattgaacaatgagaacacatggacacaggaaggggaacatcacacaccggggactgttgtggggtgggaggagggggaagggatagcattaggagatatacctaatgctagatgacgagttaatgggtgcagcacaccaatatggcacatgtatacatatgtaacaaacctgcacgttgtgcacatgtaccctaaaacttaaagtataataataaaaaaaagaaaaaaaatgtgttgagtcagtttgtttcatttttgtacttttgtgttacaatcaaacttaaaaatataacccatggtaaaaatactgcagctttaaaaatacattattatttttccctctctgtgattctggagccatatagtctatagagtagccccccccaagacacatataactattaaatacttaaaatatggctagtccaaattgagatgtgtcaaaaatataatacacactctggattttgaagacttagtatgaaaaaaataatttcactgacttttaaacttttaaaaatctggctattaataaaaatctaaaattgtatatggggtgtgcattatatttccactgggtagcactgttctaaagcattcaacagctctcctcacattatgccctgcactacagacattgacatatgtgtaatctctaaaacacatgttacaatgaaaaaaagcatattatttcgaaatagatgtgtgatcttgcttggaaaagacacataactttcttgcatttccattgcttcatctttaaagtaaaagggctgcataagatgattcctaaattcctttccaattcgcatatatttaatgacttcatcatttccccaatagattccaaagccagagaatacaattcatgtaatagctcatttcagtttgataaatatttctgaagcatttgtcatgtgccaggtcctgtgagaggaggtaattttacacctaaccatcttccacctttttttagcactattctttattcttggcaactctttgagaaatatctatggaatgaatggacacattattattctgctgtctcatatgttaatacagaaacagaaatacacacacacacacacacacacacacacacacacacactccagactggctgtgaatgaaataccaaaaaaaaaaaaaattaaattgagttgtgattctttagcagaaactcaagtgcccatataactgaatggtctctggatctggtagctaaaagtgctttactctttctgaaaaatggaaaatgcattataagtctaagtaaagagcactccaattttagctgccttggccccttctgaggctttcctgggtcaataattagcaacagagcccaggagactgggggaaggaacaggatgatgaacaagtgcaaatgagctaccttaagaaagcgatagcacaaagcatgagagcactcagaattgtactgcaaagtgttcagattaggcaggcccaaaaatgaaaaaattgaaaattaataaaccagaacctagctgtatgcactgacttaatgagatccgttgttaatgtaacacatttttgcctactacttttgtgaagacttcttaaattattttaaatatttctcaagaaatgcctctccaattttactggggttcttaacgttcttctcaattttctttccaaaagcataagggagagaaatgaaaagatgatttgaaatactagaaagaatgtaggactaagagccaggaaatttggtttctagtcacagaactgctacaaactggtgatatggagttgaacaaattgtttagtcttctttggtccatttcttcgtctgaaaaatgaggataaagctctgtatattctagaggtggataagggggatcaaatgagataatggtaagaaaaattacatttacaagatacaaatgttctataagtgtattttatacaaaattatcagagaagtctcttatgagctaaaatatgataatagcacatgtggtccaagatccaaaagtgaagactaagaagaaaaatatataacaaaaattatatccttttattagaaatagcacaatatccattaaactaacctttaaaagcacagggagcagtggttaattatatagactctgaagacagactagtggaatttgaggtctgacactgccatttactagctgtgtgatttggggcctctcacttcaccttgtgtactgcagttttcacatctgtaaaaagggggtaataatactacatccctcctatgtttgttgtgaggattaaagcacttcacatatatgaaacactggcacaatgtaggtattatataagtatagctgttatatgggagtacattctagaatgctttaaactctaggcacacttcctagctagcatttgatttatcttgtttgaaaaacagcctgtatttaacatatacatatcagaggttggaagtgtcacaagtgtatgttgggagaacaaagaaaagcaacttcagtacacaatccacaaaataatagcctcgatggactctacacttcagagggctaaattagatggtgaaaccaagtacactcatgtagtgccttggtacatgtgtggctttgtgtttttacattttcctcaggtactgaaataatgactaaaaacaccctgtatttgcattgcatttaaaaaaatcactttcacatatattacctcattagaagttgagggtcattaaaagtggacaatgaacttgctttcaccctcacaaatctctctgaggaatcaagtcaattgaatacgtgtacttgagaaaaaaggtgggctttttgccaaatactttctggcagctcataagcctgagcttttcatctgagccaactgcaagcctggaagggtccagaaaagcgactcatctgctcagcagacctcactgcccctttgttgtggtgggcacggtgcctttcacacacagctgttggtcagtatgtggatcaccgactgcatcctccttgcaagaaggccattttggatgtttcgctaaggaatccaagagtgcaaggcagagaggggaggctgactagttggggacttcctccaggattttcccataggctccacccagttgcttcattccattgatggattcaagggtgattttccatgagactacacctaatggaaaaggaagtctcgggctgttcttatctaatttgccaactgttacatcagcattattgattcagagcccccaaatcagggaaatatagaacagatgggaattccctgcaaatgttttcatggaatcatttgctaggaaacccccaactagcaaaaagcataaacatatacctttttattgaagccctgtaaaatctaaccagaatgcttgctccaggaagagtctgttctcagaaatcatgttgtctgatcaagtttacttcttttgtctactcactgaagtccttaaatacattataagagaatatgctaaacatatgtcaaccttcaatcaataagcatagtgtaatgtctaaaggtcatgatttggattatcacaatactttaggtatcaaaatttataaaactgagcatatctatattatctgccaaatggaaccagattattttaaaaatttcttcatcatcttgtgttatttgaatgtaaaaaacctgaaggcaggctgtccttgtctacttattcaacacttagatcagtgcctgaaacatagtaggtattcaaaaatatttatagaataaatgaatatctgagaagctgagtcattctcaccacattgacattttacatttatctatagtcaaaacagtctcaaatttatgaagggaaattaatattagcaacataaaagtgttttcttttgcagatatatgacattaaattataattgtgcaaagtcaaaaagtaatttacaaattaattatggagcattattaagtgagtcaaagccattctataaataaacaatgcagtacttttctaaaggttgttactattatatgtaagcccttgggatgaaaactgggagtcctatctttaatatgttcatcacgttaattaatgaatgatataaacaattcatgcaaacacctcagtcaagcattactcttggggatcagggggctatttcagtaacaagagttaaaagcagggaacacaatcttggatttggtaaactcatctaaatttcttgatattctccaaagagtagcatttaagcaaaacctggtacagaagtgaaatatatagttgaagccaactttcccttggtaaggtaactatgatcctttcacattagtgagatcgtttggaccccatcgctaaactagccccaggcaacctgttcttggtggcattctccccacctcctcctgcacaattctctcctgcagagagaagggtaaaagtcttcatgctctcccactctccaatgatgctcatgaaaatttgttctcaggtaagattctaatctcacgtattcacactcacatacattcaaatcaccaagctaccttcccctgaagtatctgacttactggtttgcctctatgttaaaagagaaaaccattttttttatttctcaaaagaaattttaagacttagctgtcaggaaaataatgtcttttagtttatttcgttttgagattaaaggcctttctctgacattgaaatttcatatgtagactaaattgaacaatttggttatgttgtttcagctacttacaagaaactacacaactcattggctggttgtctcgctgtggcacttctctgtttatgttgccatggcttcctcgacagcctcattcctgccttcgtgtctgacacacatttctgacatcgtgatggatgcctctaccctgagcaccagcacctcctcaagggaaacgcagcctcaaccacactcatcattttctttcatcaaccgcctgtccttctggatcgcccagtttccagtcttgagagctccgttatcactgaccctctgtctcctgatcccattgtagtagttgatagtgtcaactatgttacacctatacaatgttttcagaaatgacctctttttctattttcccctccatgaatttagtttataatattatttcttaaaatacaaataatacttgctcattgtagtttttccctagggctgccattacaaaataccacagacttaggtggctttaacaatagaaacttatgttttaaaacagttccggaggccagaggactgaggtcaagatgtcagtggggttggtttcttcgggagacctctcctcttggcttgtagatggccatcttctcctcatctccacgtagtcttctctgcgtgtgcgcgtgcatcttaatctccttttcttataaagacaccagccttgttggattcgggtctaccctaatgatctcattttatcaaaatcacctatttacaggctcaatcttcaaataaagccacattctgaggtcctaggttaggacttcagcatatgactttgggtgtgacacaattcagcccataagcctcatgttttccctatggtatgtgctctcagtccagaatgacatttcttttccagaatcattttgataatctatagaaaaactgttccacagccacagagccatccttaaacaaagtccctctgttcagaatccaaggcctgttgccccatgttaaatttatgttttcaagttccctttcttgcaattctaataaaacacagtcactctgaatctctcaaacacaggcttctatttcctacttcttttgcttctacttaggttttctgtctccaagaatgaaattatccttcaacattctaatcaaatgctagcttactttagcgccagcttttctcagtctgagatatgttcttccaaacaatcatgattcctggttcttagatccatggcccatttacctggctctcctatttcatttacctttctctgtgggtttcccagttcaccaaatcataagtatctatgaatagagagctccttagagcatggctactgataaatcattcactgagttgactaaatccaggcagtatgacatcaatcatttcagaggcaatatgatgaaaatatttcaaacaattattatttattcttgtttttatcttgtaaacatggcataaatcagattttgatgaccaatggtcagtgatggttttttttggttatttttcttcccaaaacagcataaaatttttactttaaacaattacaatatgtatgtatatactttattgaatttttggtgacatttttaaaaactgagagaaacactgttatttttatccacattatgagatggaaagccctggggtccattatgagtgacatgcttgcctaatgttttgcaagatctggcttcaaggcactcttagataatgtctagtttattttccactctaattcaccctttccaagatttactctgtatttgatataaaaaatcttagttcttctccattttcctgtccttaagacaccttaacaaattgacattaggctttaaaaactatacattaatacaggccaaatgtggtcgacaatttgattggctagcccacagtcttttccaaacttcttcatccttgctatctttattaaaaagaccagaaaaccaaatgttaacttccatctttctgcactcaagatgaccatgtgtcatagttctggctaaagggctgtaagctctggggaagggctttgtgtttcttataagtggggtagatacaactttagctggccatcctctctcatccttcctccttccctctcactatctgtgacacagacatgatcatctggacgtgcagtagccatttgccatcaagaggaacaggccaagaaaattgtggagatgctgcctctttgcaaatggtgataacatcatgcaacagctgaaacacctccggtgccacctacttaaaagtaattcctatttgttcaagctattgtgagtccaggtttctgttatttacaattgaaagcattgaaaactgatataccaagcatatctgttggcagtttgagttttcctcaaaggaaaactcttttgtagccatagaacatactctataatcaaaatccagttacaaatccgcgaatccagttctctaggtcaaaaggaggcaaaagagaatgagttggctgttttcactataaatcactcaccactaaggggatctctgttatcttcttttttttaatatgaagggcagcatttttcttttccctcagggattgttattaactattttctggatatatcgagaagggggaagttacattaaaaattagacagaaaggggagacttttcacttaaagttgtgacaaccttcacttaaagttattgtaacatgcttcttgggaaggaagaaggcataggatggcatagcatgtcaaggtccatctgctttcttttgattttccctgtgcagaatacctcataactgtgatccatagttggcaagaatcccattcatttccaacagaaatccaggaagcttagtgtgtctctctccagttcattatcagagcaattaaaatcagcagttttaatgctgcttaaagggcttcagattttgtaatttatgtagcctaaggcaagattcattttttatggagagattttgattccatcctaaagagttctaattaaagactccttggggagtttttcttgatctgctggatttaagattctttagtaaataacctgctaagattatttctggtggggataatttatctttaattttcatatcctaattatatttcatacatatcttgaaacccaggtcagtaatctcattaagtaaatataaaatagtatataatatactataataaaaatgatgcattgttaaaagatgtatgcaaatctttaaacctgcaggtcttgtttatgaggatccaaagctgaaaagtctttactgctacttatttgaataatagctaccttcatatgcttaatgttaagttatagggttttcttttaggtactaagtttcctcataaaaggcatacaatcattatatctctgagtgtttttaaatttaatagtttttttaaattggagtctgatagcctttataggattggccacttgtttgataatatcagtgctaagggaagaaattaggggaaaaaagttggaagagaggatccagtggagttttttttttttttttttttttttttttggagatggagcctagctctgtcacccaggctggagtgcaatggcatgatcttggctcactgcaacctctgcctcctgagttcaagcaattttcctgcctcagcctccctagtagctgggactacaggaacctgccattatgcctggctaatttttgtatttttatagagatggggtttcaccaccttggtcaggctggtctcaaactcctgacctcaggtgatctgcccgcctcagcctcccaaagtgctaggattacaggtgtgaggcactgtgcccggttgatctagtgaattttatttgaagttgtgtttgtagtgtaagcatgttgattatacgtatttagcttttatgttagttgtgagtatgtacactgggaaaactagtgcctcccaaccaacccttggtaccaccattgttttacttaggtttgtagagaaagcaaaaccatattaatattggaacagaacttgaagcgggtcttctcctcacctccccattcctaaaaaaaaaaatcatttttatattctataaattaattacattctgtgtgtctcttccatggaagagatcaacctaataagaataacagaaatcatctaatccttcccatttcttcttgaaatgttactggtacatatgtttttccttttcctgaaacccatttgcctctgcttttcacttggctaattcctattcactcctcatttttcagcttatacactacttccttccagcagccttgatttcccatccatcatattaattggttctctcctttcctgggatctttacttcttcaatgcattttatctaattatgcatttaatcatgggctgatatgtttaatgtttttcttcgctattcctttggaaggctcatgacagcaggaaccatgtcggtatgtttaccactgtgacctcagagcacagtccagtcctggcatagtataggtgctcaataaatactagtagtgaagatctcagattgctttcctgtgcccagagcatgggaaccaactccaagaagcaatagcaataggagacttctgacagtaaaatctccattttgcagaggaaacagctatgaaggcagaaagtgcccataactcaggaaaagggaggatggcaaagaactgcatctatttcacagtcttgctcagggtcatggctgtggttatcaatctttgcctctaaaaatacatagtttttgcccctatgggtggtcactgcttagtcactgcaatggatttgaactacacaacctacatttatcacttttacccatttaagaccaacttaaaggcaaaaagaagtaaaagaatgatgaagactttttttttaagattctgcagtaccttcataagtgtctccctctcagggatgaagtaagaattgctcctttaaaaagtgtctttctgtgaaaggaccggaaaattcctaaagatagaaactaaaaagctagatggcagcagactgcctttcatgtccctatcaatgaatagattgctaactaacaatcaggggcattgttcatatcaataatataaatagttcaaaagactccagaaataagttcctaaggcactcccagccatttggaataactatggcttggaaattttcccatctttgtaattttgcaaaaaatgatctagactagaggtctataactatattcagatgattcctattcataaactgagaataaagaacagaccaacttcagtaacagtgacattgctgggagaataaattggctcaagaagtaacaacagcagcaaaacggttaaggcacttcaaggtaatcaatttagctctatcgctttttgctgtgactctgaaggaagttaattgaatctctgaaagtagtatcttgctgcctggaattggtacccacaagcttcaaataaactattccatgaagtttaagctgtccttgacagaaagaagggcacaatcagctccaagccattagggaaggtataatttcacaaggcaagacagccaaggaaagtgatcctcaaagggaaactttcgtagaaaaaattttgtactttcctgtccccatccatcagtaacctcaacagagctatttttggattgtttccctttattcctattgatgactattattatatttttgaaaatgtttttgttaatgttgttagaaactggtaggttaatgaaactttagccatggttgttgttgttagaagcaggtgtaattaataaaagtttagctgtgaaggccaggcatctcagggttcaaactttagcttattgactactttttaagctatgcaacccttagcaaactgcttactcacatgacctctgttctcacagctgctaacagaagtggtggcagtgataataatgttgagaattgttttgaggtataaccaaattaccatggaaaatgcctagcaaaagtccaggcttatagtatgagctaattaatatatcaaaatctcattcctttctttttttggctttcctttcttctacggccttctccatcttccaagacccagccttagtagcagatgatgacttgggtctcctgcctaccaagaagcccagtgcgctggcttcctgacacaagacatagccctgttagggagtcaggaatctatttactcaatgttcagttcatattagaatgcaaatgctcttgcaaataaaaaacattaactcatgtctaattgcttatctacactttcagcacttcttcatttttttaaaattttactgtgagcaggctctaaaaagagaatatagcaagaacaaaggttttggctttgatgaggaaaagtgtgtggagagaacacaaaaagaggagaaggatgaaggaagaagacaggaaggtctcaaaacctgagctcctgcagcagtcactccactgaactagcccattctgagcttgtccagttcttttgtaaaccaagcttgcatgcttcttaaattgtcaatggttagcttttcatggttcttaaaaaacttaaatttttaatgatgctggtataagtgaaaggcattcataagttcccccccccccaccttttttttttttttgacacggagtctcgctgtcgcccaggctggagggcagtggtgtgatctcggctcactgcaggctccgtcccccggggttcacgccattctcctgcgtcagcctaagttcccctttttaataatgaaggtcataaataggagcagtcaacagctaacatttttgcagtatttaccatgcagtagacactgtgctgggcactgtacatgattatctcacttaatccccacaaagccttatgagctattattattatttcaatttacagataaggacactaaacagagagagaatatacagctaccaagtggcagaatcagctaataggccatgtgttgatatgttctgattgcagagtttgatgcctctcctgggtgaactcaataggaccagaacacagttctactagaacatctggtatgatttcacaatgtcacgttgtttttgcctttgaagtgaattggggtattctgaatgggcatggggacattttaagaggtcatggggcacgagattaaacctacaaatgtcatgggagcctctccatcttgtgaaccctcttactaaccaccttcattcccatttaggcttttacaaaacacatgactgtaaactgattttctttggtagaagagaggaatgttgtggagaaaacacttgaaaaagttcataggttaaaaaaacacaagaactacttgtttcatacatggttttatgtaaatgtcaaagataacctctcaaatattctttaagtttccactaatatgtgatatcccaaaaatgttgcctcccgtgataatatcttgcattcttctgttattccatgaagcatatcttacttggttctcacagccaacaatcaactgaggtaataaggaaagataaccatagccctgctttatagaggcaaaagtgggatctcatgctatatggcacagcagaaacagaatctcaaactagtatttaggcccctagtcccagccaataacaagtttcattagcgcaaaagttctttacctacacacagtctatggctttcttggtgaaaatagtattcttggtgaactgaattttgcacaggaaacaatggactcagcatctcatattcttgtttagtgtatcttaggaatcatgtgcatgtccagtctaaagcagcaggttgtctaaagagtgttcggctaggcagtgccgaaagactgcacgtcattagcttttgaaagtcattaccattaagtccatgtccctaaattgtttctttctgtgaggaaggcagaggatcatatttgaatccaagatcatcgaagtatggtagacatgaaaggcgtgtggttagggcactagcagaactcaagagcaagtatgcactttccaagttcccagggggcaggctgatggcagaaatgtctaatttgaacaaaactgctaaataacttgcttttttacttaaattcctacaaaaatttcccactgctatagcaactattaatgaaagtctgtttttatgcttctcgatgacatttttagcataatttagagaaaaaacctcagaaaataaaaaaagtaattgtaagacatatgttatgaaaatatcttatgaaatatgttatgaaacttttgttcattatgtaaccagtgccaaatttgcaaccatttaggtctctgatggtgataacttatttatcttgtcattacttttccaaatcccaagtcctacagaactgtagcttcaactagaagccaagccctacctttgtcctacacaaaaagagacctagactgtgagcagcctcgctacagatttctttgactccctttggatcacacactatgaatataagaataaccaagacatgcatccaagtttatttttaaattctagttttgctttttctgatgtagcaaaaagtgagttatctgagcatcaaattacatattttcctgaaatattttatattttctcaaagccattttccttagtaactaataatgagagatgatagaaggcaatttaaggcatctcagcatttccaaatagcattctgtctaaggttagtttcagcatgcaactggtgataaatggcatatagatgcatgtgcaggggaggaggtgttctgtggcaaaagaagtttgagaaaaagattttaaaaagttaaacagttttttagcaattctcagtgcctttaatatgcaaatcaatgaatcatgtttaagacggtaacgatacatgcaacatttcttaaaatgatttaagtatagaaccattatttgcagagcagttgcagggaccagtgttccatgggcacacgttcggtcatgtgggctcaggagtcacacagacctgaattcctattacagctcagaggagctgtgcgtccttgagagaatgattgaagcacatggtaaatgttggtgtcttagcctcagtctcttgaggttaacaaaaggtcactgaattcaaaaatactaagaaaactacattatattcttgacattcaaatgcatcttcacaaatcccctaattcactaatatcactctagcatttacttttcccctagaaaaatttagtgggtttttttgttgttttgttttgttttgtttaaaaaaaaaaaagcaattctcattggtgcattaatccctgttgctttacaggaatgtgttcagtcttctcaccctctctggaatctcattttcatcaacagcccctatttgctaatgttttaattctctcttgatgagcacttttgcattgactggcacactctacagaaagttccaattttttttccctagaaacaagcacagagtgaactacgatggacttgctcataaaatttgatctcatttatcactttaaattttatccttttaaagaattaataattttcttagctgtttttgcgtagtgtctactgtctagatcaacgctgttcagtagaaacataatgtgaaccatgaatgatggccacaacatgtaattttaaatttttaaaaagccatattacaaaaagttatttttacaaccaggtgaaattaatgtatttactttttacttttgtgggtacatagtaggtatatttatggggtacatgagatattttgatataaggcatacaatgcctaataatcacatcagggtaaatgaggtatccatcacctcaataatttatcctttgtgttacaaacaatccaattatactctttaattaaaaaatgtacaataaattattgtgactgcaatcagtcttttgtgctatcaaatactagatcttaatcattctatctaaatatatttttgtacccattaaccatctccactcccacacccctgccactcactacccttcctaggttctgataaccatctttccactctatctccatgagatcaattgtcttcatttttacctcccacaaatgagaacatacaaagtttgtctttctgtgtgtggcttatttcacttaatataatgacctccagttccatccatattgttgcagatgacaggatctcattcctttttgtggctgaatagtactccattgtgtgtatgtaccatattttctttatccgttaattggctgatggacacttagatacaaccaggtgaaattaatttaaatatgttttatttaaccctatacacagtattagtatttaaacatgtaatcattatgaaaattacaaatgagaaaatttttactttttttcacactattatttgaaatcctttgtgcatgttacattaccagcacatctgatttggattagccacagctcaagtgctctatggctactagctctcttgttggacagcacaggcctagattagcagtcagcttccttctgggtggcatttttctacacaggtacaatgtgtttatcagttcagagttattacatttgcaagggagggtagagaataatgaaattatattgtgatttgaatacttggtggtgcatgggtcccttcaatagtttggtaacttaaatccacacgagagctccgttgtactttggatcaaattactccctgtcatgaagcatcagagtcccttataatagtccacaccacaaaagccaagggatttttgtaattgttttacaagtaggaaaagcaataacagtgatttgaaatttttacaaagttaaattctgtaaatatatgttgaatacaaattgtgtacttgacacttggctagttcttaacactgaaagttttttagatatgagacatccaattttcttggcaaaggtatgtatgtatatataatgcgtatgcaaacacacacataatatatccatatatatccaaaatacatatatatgcatgtatgtatgcatggcgtaactcctatctattttacagggtcacttggttggtgattatttccttcttttcctttgaatcatgggcactatagaaaagcataaaatcagtcttgtttcataaattaatttttctattcaaacttgcacttatctttgatggaaagaaatgtatagcctattcttgtgaataacgctagctgatgtgagctgactgtttactctatgccaggcgctagtttaacggctatatatgtattatctcatttaatacttgaataactctaatgatgtaggcgcagaggcacctgaaacagagcacacttaaggaatttcataaatgtcatacaagctgcaagtggaagagccatgatttgaactcaggaatttctgctcaatcatgaagtgaactactcactttaaatgcatagtattctaacactctctttttagataatgatttgttagctaacctgaattaggtccttaaaagcaattctcaaattatgattttacatatctttgaaggtcttaacggaaaggaactttgtaaagatagttttatacttagcataacctctcattttattttccttcaagacaaatccatgaaaaaattcagcttcattccttatctctgacaaataccagaatgcacaacacatggtgcctctgatctgtatcgtttcccctagcgcttgcattcatctttgatgttgatattttgtggtctagtggctcttgagagaagacaattacctatctcctttgaaccataaattaccatatttggagttgcttcttcatataatttttactagtcctttttatttctctcatatataaattgaaatgttgaaatgatgagatctatttttaaagtacataaattttggggaggaatgggacagagtttaaattgttgacaattatacataaaccagctgaatcaactgggcaagtaaacatgggcaagtaaactgggcaagtaaaccttcagtttcacattaatccatttgtgtgtaggcatcagggaggtctcattcttgtaaccccagaatataaaatataaagtcagaagtagtcttcattttcacacccctcctcttttcaaaaaattcatttaaaaatatttaactgacaaacattgcatacatttatagtgcgcaagatgatgttctgaaatacgtacacattacggaagagctaaatcaagctaattaacatatgcattaactcacatacttttttgtggtgagaacatttaaaatctactctcttagaaattttcttttttttttttggttttgttattatttaaagttcagggatatatgtgcaggtttgttacaatggtaaattcgtgtcatgggggtattaagcctagtatccattagttatttttcctgattctctcccttctcccaccctcccctctctggtatgctcctgtgtctgttgttcccccctatgtatccatgtggtctcattatttaggtcacacttataagtgaccacatataatatttggtttacaatacattgttcttaatgatagtcaccatgttgtacagtagatctcttgaacttattcctcttgtctaactgaaattttatatcctctgaccaccatttccccaatccctcctgttcccatcaccccctggtaacccccttctattatctgcctctgtgagtttgacttttttagattccacatagaagtgagatcatatacatctctccttttgcttatacttactagctttcagccagaagaacaatgttagcaaaagggtcacttttgaaagctgaccaacccctggttaaaacaacatatatcagaatgtacagcataaagtttaaggcttcataagtctagcagattatatactcaatatacatttgttggatgaattattgaattggatataagttcacagggacattgagctattctttgatatttcctgggcttggtgttgatttcatgaatgcatgcttgatgtatgaagaaatatttaggcacatatcttggatcatttacaattttctcatacctccataatgttatttctgtaagcttaaaaggatattgtaatatacagtccatacactcaatttcgaatgagaaggttgaggacccatgaagttaaggtaacttgtccattgttgtttaatgagccaagacaaaagtggaaatctagttcagccggctgctgcccttccatgcaaaaactggtataggtcatattatgattaccatttgaatgcaacctaacaaaatgttgtggtctgagacttcatttatgataataatgaaaatttatattaaaagcaagaaattacattttgcgtggtggattacacagtacatagcacataaatgaaatctggaattggatttgaatatttaaaagtacattatgccttcatacaagatactaaacgttttatgggggaagaggtttttcacaagggttataataaaaatactttttatctatgtagttgttccttagcagttcctcagtagttcttagtataaccaagaaatactaaaagatgtattggcccatgccttcccctttccccaaagtttactgtcataatggtaaagggtgagcgaaaaatgcttgaaaagcagcccatgatcactgaatgattccatttttagcacaagcttcatgatatgaatcgagtgactcttacgtaaaaattacatactttttctttttttcagagatgaggtctcactctgttgcccaggctggagtacactcctgtgatcacattcactgcagccttgacctcccaggctcaagcaatcctccctcagcccccagagtagctgagactacaggcaggcaccatcacaccctactaatttttaaattttttgtagaaatggggtctcactctgtagcacaggctggtgtcaaactcttggactcaggcgatcctcccacctcaccctcccaaagcactaggattatagggtaaaccactgtgccccacctcgtatgctttttcaaatttcacgatgtgaagtatctgtctggtaataaagtgatatattgtttcacatcatgaaacccttagaatacgtttgatattgctctaatgtttacttatgttccctcatatgccacaaagtagagagccttaagattggattttgaaagctttaagaaatgggacccacagttatcacacatactaaatttttcctgacatcatctaataattaatgatcacattttgacatggtacaaactgaaccaggtcaacaaactttatatgccagaagccggattgatatcatcaatcagttatggggagctttggagatgacataaaaatgaggaatatatattaccggaatcttaacattaaaaagacataatgactataatgacaaaaaagaaagaaaataaagggaaaaaaaccttctttaaatgcatgggtaaacaaaatcttgaaaaagcaatacacatttattttagcgtgacttacactgcctatgcatttactagtgtttttcaacaggttaaggtggtttaggaaaagtccaaaacatattttccaagaaataatgtacgggaaggaaaacctgatttaaagtgagcacgggatatatagcaagaactcaaagtacgacatggaaattttaaaacagaataaaagattatttattggtttttgctaacaatgattactattggtttgaaaaatgaatctggataaaatgtagaataacatcacatatttaagctgcatatggatcaaacagggaaaactctatttctgcatatcagatcgtttcttattttagtcacttaattcacagttacatagtattcatcatgaggagaaacagacagagtgtgaatggctcactgttacccacactattcctggaaaaacaggtcctaaagattaaaagactcaactgcataaataaaaggcatgatgacattgttattacaggcaaacattttttaagatgccatcactgaaaatggatgacctatactttggtaagaatgcagagaactgaaacatcactttgggggcgacataaatgtggcaaccagtatagaaacacatttggcaatatctaaagacaaaggcataacctatgacccagaaatcctacctcttgggatatacccaacctacgtgtatgcacaaaacactgcaacactacatgtacatttgtttactaagtgatatatccaataatgttcataatggctctaattcataatggcctaaaactggaatacttaactatccatcaacactagaataagtaaattgtagcatattcatttggtgcaatactaacaaaatgagaataaagaatgcacaaaacactatgaatgaatcccataaacacaatattgactgaaataaaataagagtttatattgtataatttcattcatataaaattcaaaagtagtcaaatctatgctattggaagtcagttagtggttatcttcgggtgcatagtgactggaaagaagaataaaggggtccccttgggagctggtaatattttgattttgacctagatgttggttatatgagtaaatatggctaagcatttttttctctcttactggcacattcacacccatcattttataccaaatagatccttgcagagtgctaagggttatctataaatagcaaagaaagagaatcctttccattttaaccaacatgaggaaggcaagactgcgagacttttttttttaagtcatgtagtgctaaaacaaacaataagccttttaaattcactccaaaatacaggataatttgtttcccccaccgataataatttcttctttccctttcttggcattttggtgtgtcagatctccctaaggtttatgttgtctcagtttacacggatttgctttaggaaaaaaacctgacgttccttgtatgagtatctcatccaaggggttgaaaagcagcgcatacaacagaagttgcacaaagccgtccttgtcatcttccacacaggaggacagagaacaaaaacgtcccaaccagtgagtggcagtgccactgaggacctcctgaacaactctactcaaagcattttgaactttataccaagaaactgaggaaagttaggagggaaaatatatagtccttttctagaaccagtaagatgtgagataaacaattatttgagcgatgaaatgttttcatcttttagttcatctgagatcagggcagtgatacttcatagaacccacaaataaaagcttttcgtcaggtacaacctgaagatggcagaaggagttttgttgcttgtttttttcctccactaaagtggccactctttcactagagaatgtactaacgtcatcaaattaatgtgattcttaaacaggacataaatcttccctttggatgggaacacaaatctgattcattaactttccattctttatctaaacactgccattatgtgaaaagaaaaattcctgaaaatcaaggatattttgcagttaaatccctcctcccagccagtctattttgttaccctatataaacaaactctgccattacattcctttatccatagcaacttccagtgggtaatccacaaatcaattaaaggcaagttaattgccaaaaagggatcaagtgacaagcattggaagcatatttatgggtgctattctcaaaatctgtgtgtcagaaaagtttcgtccagctagctttccttttaatgcaagatttaaaatttgtattatttctttgaaaataaaaaattaatctcacagttattcttagcttaaggtgtttatgttttgtaggcagacacagacacatatttcaaacaaaacaaggttcctactataggactattactactgctaccgatttttaacttccatttttctttgctttagtattttctacgtataaaaagttttgagatagtgtgaaacaatgtaatagaaagtatattgtaaactgctcctcttccccctacatcttcttttcatcttcctccttgttttactttccctcactgtatttttataataacaaagaagcaaaggtaaattcactcaagagactggagactgaaaacaagtcagtaatgaggtcaatatttatatggttccattgaccttgtgcagttctgagtttcaggcctagaactacaaatgtactcacagatgtatggaatggatatgcttgaacttatatgcaaataaattatcaatttctttgtaaaggtttccctggcttccccaagcagaacctctcatctcagtctctatttattttatttattgttaacttgtttattttctgtctttctctaccagaatgtaaacttgatgaaagcagagaccgcatccattttgtccctcactacattctgttacatttttaggagtatttataagtcagttgttaatacccaacagttattaaaaattaaattacataaaaatttttaactataattaaacaaattatattaaaaacaatggaaataagtattcaaaactcataacttctgaatgatttggctacattttgtattattatgtttttggggcaacttatatctactgtatctatatgatagaaacactgtatagagtactatgtctatgtatctcttgccaactccacatttagtgacctctgctgtttgaaatgggcaggtgagagaattttttggcacagaaatcagcaaatactacaaatagtgcccttcccctcccccatagagagctggttgtgaacatttaccacctgaaggaataatcttttacattctgttctgttcatttttgaatgtttaattcattgtcataacaattttagggttttgtttttatagagtttatttctttagctcaacacaaagcttatctttttaaagcttcacttcaaagctttttttttttttttggaatgtggcttacatacttgtcccctttgaactgtcctttgcatttgattggcttaacataattacagtaatatatatttactctattcacaatccatctttcctctttatcattttagtttttctcttccaaatttacactattaccagctaatgaattatataatttgagccatgtgccatggctcatgcctgtaatcccagcactttaggaggctgaggtgggaggataacttgaggccaagtatttgagacaaacccgggcaaaacagactctaaaatatatattttttaagccaggaatggtagggtgcacctgtagtcctagctacccaggaggctgtggctggaggatcccttgagcctaggagtttgaggctgcaatgagtgatgatcatgccactgtactccagcctagatgacagagtgagaccctgcctctaaaataagtaaataaaataatacattcagacaagttttaaagtagcatatagtattcttcctttgccaatggatttttcctttgctctgattcaactctgtgtgcttatataacccagccttacggaaaatcagacacctctcttcagacccttgttgaaattaaaaaggcttgtcaattatagtttgaaagtagaaaaaataatggaagttaggaggagggagagccaaggtagaaggtgggtatatgactgtggcaaagaacatgatagaagctgaggcctccagaacaaggagtaccaaggtaaagtgtatagaattgaatgcttcctcttttgtaagaagtattccttatttgctctgcccagatcagacaggctttgatccagctgctcagtcaaggtactgtctcttaaaatcacttgatgggggctcatccacttcatgacttaaggacaaatggcactcgttgaaaatcataaaatcaacattatgaaaataaatagtataaattttataaactactaattaagcataaatattcatacctattacccattcaaaaatggtatagttttaactatagtgaaaaccattaacacactgatgatcagaaatatccacagcatgattataaacccttggcagtttggagtgtcttttcttcttttgtcaccttgatttttttgtacatctcctggcattccacatttgccagagctctgtgctggtccgtagcctgcaggccaccttataaaaccaatacctttatatttattgcagagtttgtaatctttctgcctgtggttgttccatgtgctgtcatgataatacagaaaacactcaaactgtatctcccctctctatctctgtttctagtctacattgataattgagcagattcttttgaatgtttgagatggggctttccttcaattttgaaaaaaatgcatataatgcattctacaaaaatgttgtttacaaagtggtacttccttacaaaaaccctattgtagctgttgtagcaagtgatttttagacttgtaagtaaaatgtctgaacataattttacttggataagtctttctcttattcagaaacctgtccttccatggtcattgcccaattatggctcttatacactctcctgtctgcaagaagtgtgctctgaatcattcattcattttgctgccttactgaaagcactgaattagatggcatatgtattgaagtgaggggtgggacattggaacaaagattttcacagaagcacacagagccagggttctagctctgaccaggccgctatcaagttgcatgaccctggggcctttcaaggtcttcaagctcttcaatgtaagacaaatgagtttgaacaaatgaaccatcaggttccttcagctctaaccccctcttcccatgaatgtggcaaaaggaagcagagtatcctcacacttgccatgaatcggaacacatttgctaataggttcattcattcaatacacaaacgccaagcacctaatatgtaccacacactcttccaggcactggccatacaaaggtggaaaaaaggacaaaaattgctgccatgtggagcttacattctattattaataatagctgacatttattttagtgttgtctatgtgccaggcactttacatggctaacacacttaatcctcataatactccattttacaaatgaggaaactgaggcacatgaagtaacttgcccaaagtctcatagctataagtgataatgtgaaaatgtgaacctcagcagcagtgtggctgtagagctagccagctgtcaatcattcctgcacactacatttccaaggtgagcctgggttgtatgtgcaagttgcttataaggtaaccatttataagccagctctattgtactattctgtgaccaagagtggtaccaatgatgatagtttatctgaaaatgtatttcacaaaagaagcttcacaaaatttgtgaaatgttagtgaagacttggaaaatgctatgaaagagttggcaggtagtcctgcattcacgtacatgctttcatctaatctgcacaacgaccttatgaagtagatattttaattttctatttatgtacatggaaatggctcagagaggttaggaaacctgcccaatcaagaaagcagcagagttggcactgaagctgggtctgtttggctctagagccaaagttctcctcctataccatgctacctcttcctacaatgtgcaatggttgttagtagtattgttattcttagatataaatgttgtctataatttctttttgtcaatttagccaacattactcacaatttgaaatatcattaagaaacctagtttaatagtcaagactatgccagtagaataaatagacatgacacaggatggagttgacctctcgagctcagagaatcttctggctcctctgaacagctggccaaggagtaatatttggcagtaaaatacaaccacatgaccaatgtttttggccagatgaaatgagccagatggaagcccatgaagcaaaagccaggagggggcagaagcagacaatataaaataacggattcattttcctttttcttctttttaatataaaaatacctctattttgatgcttttgcttagcatttctttaaaccaacatcaattaggttagaggacagtttagatattatttaacaagtttatattttaactgattactaagccctattctataacaaattacgtggtgttctgtcttcagagaaaaattcagagttaagtagaggaagatagtacatctgttagaacaatacctctcattatggaatttttttccttgtgtgctgataataggatctggtgaggaagctggaggtgggagagggaccaggagtcctggttctaacacagacttccagaattcacacctgtgcaggtttcttaaacttgctctgcctggtttcctcatttgtaagataaaggtaatgctagatccacctcccgaggctgttttggaggatgacatgcatgagctaatgcatgtatgggattgggaatggttcctggtgcatagtaagtgtccaatacaaactagctctactgttcttactttggactttctaaccacatatatgtgtggtctctagtccctgaaccttcaattcttcttctcttatttgatactaattacactcatctttttcacttaccctaaagaattaagtgagatgagctgtggcacactaaaaacaacagctgtcacatctgttacatctgaaaagctttgaaaactaaaaagtgctatgcaacaggaggtattcttggggtatgcagaaagttacatcccagtgtattgattcactggtggcattcacttcctttctaagatgtgggtttgagacagctttttctaatgggaattgtgcagtttggttgggcaatcactgatgtgctaccactcaggttttggtagtagcaaagagtagctatgagaccacactctcctatgatccctgttcatatcagctactatacaatttccagatcaaagttgtagatttggtctttacttcctaataatataggaggtaatttagggatatctagatcttcttgtttgggcaaatattgctttatcttttcatagcccagataccatttgtacttttgtttgttgatctgactgtcattaatccttccttctactgttcagtctatgtcatatcaaataaatttactcattagaccttctacacgaggtacaagcatgcacatatgtatttaattaatcacctgtttggcagctctgctaaaatgctgggaaggaaaagatgttgaaacaattggcaaaaatgagatttggagattttctgagaatttctatcccatgacccctattactataaagggcaagaaaactagaagacactttctgtttctggcctgtggaatgctatggaataatctctgccctacattcaaatgtaccttgagtgactttctcttctatttacatagtacctaccccaaacttgtcacataaaatgttccttttaacatccttgtgatttgttctctttggaagacagaatcatctcaagaagagtaattttctatttaaagtttccttgaacactactgtagttttaagcaataatatattttaaatcacaaaattccctagtgttctcttattggagttgtcagggtccacaggcttgctaaatctttgctccttgattctttctttacttcccagatcgtttttccccatttttttttttttaggtactatgtttaaacaaccaatataaacttctccacattgttttcttgagcacatcattctcctctttcttctctataatacttgggaggggcgttgctctaaagtaattaggtgaatctttaaacatgtgtgccagaacctaggcagataaatcagcaccttgccctcaaaattagtactcatctttgtaagtggtgccctaatgctaacactgatcccattactgaaaacatggttggcaatctcttctgggctcacagagaaaaagtaccttccttattatgtaaccctctgctttctctctttttctcttcctcactcctccttccacggccctgctcccctcctctcccctgcctttccttccctctccctcttcttttctctttcaatccttctttctgcctcaatcaaacttaataagctatatattaatcttttcttataaaaatgtattttacccacataagataaaaaattgtcacagctgaaaaactttcacatctattttgagcattgtaaaactgtttcagattgtatttctcaagagtcaacactcattaaatgtatatgatttgctattactttaacaaatcagacactaattgaatttcatatcttgtacacctggctttcctttagcctgaatattaccaggcagcaaaagccatgccaaggaaaaatattccagttaaagctaagtgtacccccagtagcatgcattattatccattcaatagccaaagaaaaatgacactacaataggcacatttgaagattttacaagataaaaaatattgctcataaaaaaaattataagggagaaattcaatgaagaaatgttgtccaatgtccagttctttcagttgcttcaataatggaatcagatccaaagcctcttaaaggtcaagataagcttaagttactttcaccgcgtaaggattttgtatattttttaaaaaataagaaatgcaaaaacaaggctgtgacattatgagatattttacatgtttacatcaaatagtttaacacctttaattccaagaatgctatgcaataaaactatgctcttcagaagataattatagcatttaactgtgcgtgcatgtgcctgtgtgtggtgtgtatatgtgtctgtatatatatagagtgactcatggtgcatttgaggtattatggtatgataaaaattttaagttatatgatatgtaccttttttcattattgtcagtacattgtcgtggctgaatgcgtaatctcctttggatacatgagggacctgcagaaatgcaagagccagtggccaactgccttcctacctccctaacccttccactcaattcaacttatgatagatatgatcatatcaagttggctatgccaataaaacattatcgggtgatgccaaataagaaagggtaacagaatactttatcaaataggcattactggcatttttgctgtatgtaaggaaacttctaacctcaaagagtttgcagtgcaactggaaagataaactagaacctccaaacagtgaaagcagcacatataaaaaaattaattattctgtgggaaattgtatattcaaattaagaggaagtaaaggaaggactgagcctctcaagcttccgaaggaaactgactcatgatggatatttgagatgtcattctcacctcttaaacttgttacaaatgaaacttgttaaaattacagatgtgaggtattcaaatacatgaaaaagtcattcttagctgctaatgcttatattttggaaagggtcagaacttgaccaaaggaaccttgaaaaaatatatttatcatatagctttaaattgttacaataccataacacctcaaaataaaaatatctttgccaaattgagaaggcaaggtttataatatatttgcaaactacacagaagagcttaaactctgcatttcgtgagatttctcaaattcattagtcaatcaagctattgcttttactttattcagcagctggagatttatgatattaaggagcttgttatcagatctagtgatgaagagagcctagaagccaccatatgttggaaatatgcacagtaatgttagcaaatcattgatgttaagttctaaatgtacaatttagcatacaataagcatgagaatcacatttaacaaaatgcaaagcacataggaagcatataatttaaaattttcaactaaattttatagctgtaacaaacataacaaataaatcattattttattttgaaataaaaataaatggagttaatacctatacctttagctggcaaattatatttacctcttgccaaagtttgcttatgcattgttatacaaaatttttaaatttgatttctctgattttatagttccctaaaaattccaaggacattatcttctttagtgtctaaagcaaataattaatccttataaattattttaattcaaactttgaatgttttatatgcaggcaaatcagaacacattttaattcagtgttaatatatatttctacataggcttggcagcttccagatgtgctgcatttggtctaaataagaaagaccttatatccaaaattttgcaaacaatgtcacttctatttactattgattaaatagatacctttcagtgctatagattgtaatcaatcaaaaacagaaaaggttttctttctaaacaataataaagaataatcaatcttctctttattaacacctagaatactcaaatgaagaaggaaatccaatattttttaagtgttttctttctttccagttatttggttaaaataagctgattttgttgtaaaacagtcattgacagtttagtgaagtcatgaggtcaagatttttaatatgacttccagaaacaaaagattattaaaatatttagtttgaattcatgacatgtaattctgctgggcaagatgaacactgaattactacctgaaacagcattagtttccattttttcatgtgcatgtgccctgaaacacttatgaagaataatgtagtgttttttttgttggtcaaacaagaacccttccctaacatttagagttgactgtattaagccattagacaagttaatacactgtttttcaggtggcagtaatatgaatgctttgttaagtttgccatttaactctcagaattagcttttaaagttagtcaacttccttcaacttctgcacgtacctacatacccctatttcaaggtttacatcatcttcttggctcttatttaatatattgtcaatttaacaagcattaggagttagaaggtcaacatagggcaaaggcttatttgcaaggggcctaaggcagttaaacaattcttcctagctacaaaaggaaaagagtaatacctgtaggactttgagaaacgcaatcttgatttggctcttgtagatggtcctggcaccgtggctcccagaggatcccaaacaaaagccatttttaaggacgatgccaagatccccaggaaccacgagaagtcagagctggtgcggggctctggggccctgaggccccgcacggagcaggaggcacttgtagctgagtgagggcatttcctttgtgcagtggtatgcgctgacagagagatggcaggctggctgaggcagggctggaagggatggccaggacttcctgctgcatgacacttggcctttgcgacagagtttgcttcactcaggccttatctcataattaacgtgagaaacactccctcgaaaatttgtttttaaatatagccctgattaaacagcatagtcacatgccactcctgaaaagcacaacacacacacacgcatgcacacacaacaaaaggtgtgattgaagtgggtaaacctttatatcagtgtgaactttaaaaaatgtaaacccacagggcttcgttaaaaaattttaaaaaatacatgcctatgactgggtcatctgacaaagattactaaatttcacacagctaactgccaactataattttccttatttcaacttctcttaaaaagagatggatataattcttagccaaccttccacaggatgtaaacaggatttactcgtcttgaaaataccagcgcctctctaaaagtcagtgtgagaaaaaaaaacaggcagatcactttcagaacttttggcagctttgccctcaaggagatgctgcgtcaccttagagagtgaattacaatgcatgactctgacaacaaagatcaattatcttgtccattttctattccctagaaacatttcttaactctgataaatctgttaaaacaactttctttcaaattaaataaatgatgaaagccaaatagaatccttcatatattttatgagtccaggacattttgggaaagcatctatttcaagaaattgtacccaaggagtcaaaggaccctagtgccgtcatcggtcctcaccactgagtggtattcaatgttaacaatgcagcataatttcatcagtctgtatccaaacactgccccgcgggtgacctcaactgtaaaccaagggagagcgccacttcttcaggataagattagagaggcttcaagtgcccaagagtgaatttaaccctctctgaactggacaaaattgaccaagagttgagctcagtgaacatcaccatatctgcaaattttgagacctctaaagctcaatctgtctcttgtacaccaagggagtcttgaatattcatataatttcaataaaagctcaagacattaaacattatgcttgttttcacaacagcatccaggacaccaggggttcttaagaatgctacaggtttcatatcagctttggagacgagtaatagaaaaggtttttacagtttcacctctttcttatcagacatgagctcaaagaaagtgggtgagtgagaactgccctgaacagcagcaaccttggaggagcagagagttcaaaaataaacacaacacattctccctgaatcaacttgcaatattgtaacgcttcacaaactgtctttttgcttttgtatagagatccaaatttcgcatgagcaaaacaggtagccactttcctggtgttctcaaagaaggactgaaaaggtgcttacactgatgccaatctgcccttctggtgtatgaaatgccaccattatcatttaattctttcaaactatttaatttccattttcggcagctcttaggaaatgcacacattcctggcagagttagcactgagctgaacaacttggtgcttattagaatgtcttcatctgagactaaagccagacagtgtaagataactggtgatctgcgtaaagaggggaggagtccctaacagctggtggggtgaggtggcttggtgtgaaagggagggggagggaggccacaaagacaagcagaagagtagaagggatgttgctggcaaagatggacttttttcaccctccaggcaacacaaagctctcattttgtccagtggtgtttaaatttttgtaggtgaaacagcatcactgatttctaataaaagctacagtttatgtatacgactttggaagcagaaaaatattttcattgttatcccaattttactgatagcaagataaaccctatctttgtattcaggctaaagccagcagtatacattttcacaaataattaactgcctttgcttacaaatttacctttttaaagggatattcaaatttaatggatatctaattgataagctacaaggacatacgaataatctagaatgaatctgctagggaatgtccaactttttctaaaaatgtgcaaggaaggagaactaatcttgtctttttcattactgtcaaaaacatttcttccttcttttccccctgctttgtaaaggcagtcatctagaacagttaagcaagataaaacaatggaactgtaaatgtgaaattatgaacaagaaaattgaaactctgcttcattttcctagtgtgaaatcagttacagacacaagaagtgtctgtcaatattaatattattttttcttaaataattacttaccgcctccttttcatttcttccacacagttacacataatccttcttaggttaccaggtctcagtaaggtcatagaaataagctacttatttctgagattaatcatgagcaaaattaagccttgatttcaaatagaaatatcaatattgtttttgaagaactggctaatatttcacagacatgagaatttagacatttggaaaaaataagaaattaaataaaatgattttctaggatgaatctttactagcatttataatacaacaagctgtttataatttttacttcatgggtatcaaagagtataaaagaacaaagaagacatcttttgaacattctaattactgtcatttattaagcgtttatttttccagatgaattttagtaaaagcatgattcaatagcaaggagagatgttccatccctgagacaaattattatgtttacaagttgtgcacactaattttatatgtcctagggaaaaccagattcggaaatctaaacattgctccaatccaattgttatccatgtaagtcctaaccccactaaagtatcagcaaagtgcccgtctcctgccaataacttagctcttatgttctgcagagctctaaataaggcatcgtttttgcctcttgaatatttctgggattttggttccaagattccagatgttacaaatggcaaatttgggtttcggtgtctgacacagaaactcagaatttcctttataggagatagctactatgaataaaaatgaaactcccaaatttgagagtgggataagttaaacgtaatccacataggcattcaattacttgcgcatcaagtctctagttaacaggcatacggaagagacgagggttgagctgaacttcagagaaataagcagttacatcagtggggttgcgttaggttgaaagacattgcttcaggaaaccagagcaggcagatagtgggtttcaggatagtgctgtattttgaaatagtctctggttacagactcaaagccagcagaagttaatgtggaagcaaataacagactgttatttaccatctacttctgatgagggtgtcgttgtaattctatcttcagaatgatacattgcaaaagagtgtgacaaaaggcagtttgataacggggcttgtgtactccttaaaactaatatccattcagtacaagtaaatgtaaaaaatgatttttattacattacttatcaaaatcaactataagttatttctcaaaatggaagtgttgcaaaataataccaaaattttctttgaattgctttcaaatattcattctaaaccttatatgagtctacttgattgaaaggtcaattattccatgttctgaaatgggagacaattattttaagacttggcaacagtaaaacattaacagaattgaaggtaccccatggtcttaagaacactgggaaagcatgctctgtgttttaagcttctacaattgcatccattactcatatatgacccaggacacaaacagacacaaactgtaattaaagagctaaaatcaggatatagactaaaacaatcaataagaggcatgcttaaatataatgataaaaaatcaatatgactatgattgtgaatcaaaatgttttactagacacttaaggtttccatctacattaattttaggattttttttagcaatttggaaaacaactaagtcaagcttttctattcactaaactaacaaagctccttctaaagctttgttggataaagcctacttggataaatgggattgaaggaaagaaatcatggaggaagaaatggaaggaaaagaaaataaattttatgtttattgaatatctactaaatgactgacaagttcctaagagatttttctaactattcaaaaaatatttctagactcaaattctttaaaaatcttgaaatcaatgtagactaatcatttgaaataaataatttgacacaattttctaacaagtgtgtaaaagtcttctggtgtcactgattgtcttgttcaattctctgtatatgaagattttaaaagtcataaaaattctttctatttaatattctactcatgaatacagtcttaaataaaaatcctacttagctattgactggtgagtgaaggagtggtggatataggattacatcttgaaattcacttcctccggaagtcttccctgcctccccataccaggtgaggtctccactgcactttgtacttcctctttgtcaatgtcatcacattagtaatgacttatttggtatctggctcccctgatagacctaaacactatgagaacatggataacatctgctttccctctgggtactcagtgcttagcaaacagtctagagacataaaaaccacaattatgtttgtttaataaatggacaaaccaatattttcagggcatcttaaaaataagatggagcatttacattatattcttatatgtgcctaaataggggcagaaatttcagaacaggtaatttaggtagggcttatttagtttctttttcctatttgattgattaattaatttttttaatcaaaataccattgggcaagttttcagggcagcactgtataggggattagagattagagtcacagttatgccatgaacttgccatgtgaccttgaagattgttgcctgaccttgctgagtttcagtgtcttacccatttggttctcatttgagagccattgcaaagagttttggagagggctgaataaggcaatttatataaaaacattctgaaaactggacaaaattttaggcacacactactgatgtttgtaagcttttgggagaggtaggaaaactatttttatactgttagaaacatctttaagttctaaaaattgccaattggttacttcatgagcatggtaaataggcataccactttatcagtttcaaaaagaatatcagtcctcagttttgatagataacacttttctctatttgaaatctttatatcccatgtgtgtaagaataaaatattagctgttatatcttgaaggttaatcatatgaagaaatgttaatgttttatttgcagcattaaaaccctctaagaactttgtttacaagatctaaaaaaaattaggtggcaagaaattttacaaaaattaggtgatagaatttctcgattgctcaaaaccctaagcttctcctaaatatagaaatgtttctacttattttttgaaaacttatgggatcctagagacaggttgtttaattgggaaaccagttgcaacactgactccaactcatgctacccttattgttggccacgtaccaaataaggacagaaatggcttcttacaactttttagaattatgcttacaaataagcaaaagcagtgatgaaattgctaggctgagaaacaaaatcactcccttgggagaaagaaaaaagacccccaataccaagaatccctaaataaaaatctcatgtgctaaattttggtgctgtggattttttccgtgactgttcaatatcttgctaaatctggttatccatttgttggagccaacagtcataaactttcccattcctgagtacctgtcatcctcagaccccttccttacttggacacttcctgtgcactgaatgagtttgtgaaccaaacatcaccataatgtcgggttaacttttctaattcctcattttactatgatgatatcaaccacttatttggtgtttattctgtggtgtttattgaccttgctgagttataatgtcttatccatttggttctcatttgagagagagccattgcaaagagcttttgagaggactgaatagggtaactaacatgaaagtgttctgaagactctgcacagaattttagggtatactatatattatcctcataataatttatctgtgtgctttgtgttatttttattctgtatcaccactgaggaaacgaagacttacgaagttgaagtaacttgcccctatgatcatacagccaatgagtagcagatctgaggttaaaattgaggtccctcttaattgcaaaatgtatatcttaaccaatacatgcctggaatataagtaaatacaggaatgaaaaaggtcaggtcaccttccttgaagaattaaatcataagagaagttttgaactttcacaggaaaaacaattggtgtcaggtataagatctacatgttacttaatcttccaactcacgagcagacattattatcaccactttatagatgagaaatctgagactcatagaggttaaggaacttggctaacaccacagaggtaatatatgacagacatgtgagtccaagtcagttttgcttatctctaaatcttgtctccattgtggctggcttacctgagatctttcaattcctaattccaggacaaaattggcctgtgagcctggggtgggactgaggctgcaagtaggggctgagtgggttcaactgtggtaactagagagagaggaggcctagagtatagttcagcttgaggaaaagtgatcctgtcaatgtttgtatgcattgtgcactgccctgcactttccctctgaatattctacataggagaaaaatcacaacacttttcagtccatccaaccaaaggtaacaatgtgctaggggctacaatagaaatccagatgtttgagtaacagcaaaagaaaacagcttattgttgttatttgtttttgttttgtaacagaatatataaaacttagggtgccatttactagctatctctcagaaccagctaagaaatttataacagacatttacacaattaggctattattaataagacaattggactggttctggtttttgctttcagtgttaccactaattttatttctactggttcagtggagttaagtgaccttcccaagtttggaaagtgctaaataatggggccttgatgaaaactttagcttacctctaaattttagagaataagccatttttatattagagatttttaattaaacttactaccttaaaaatgtagaagtaaatttgagaacacacaattgttatttcattggtcagatgatatccagtaaaatcatttatccagcaaaattctgagttaaatttgacgtgtttttgtttgatatatatgctataggtgagtcttaagggattgaatttatatttgaaaataaaacaaactttggtcaaagaaacaaaattataactatgggcttttaggtctcaccaggcactggatggtgaaatgcatgaggcagcaagtatttttctaaatattctataagtgaccctaacaaaaacacacaaagctttgaaataaacagagctaaaagatatagactagtaagctactttctatatggaattttgttcaacagctaatcaaaccaaccagcctcccttcctttttttcttcctccctctctcttgcccacccacctaccttccttccttccttcctacctaccttccttccttccttccctcctttcttccttccttctactcacaaatgcatgtttagcatcacctcacatgtcccaggctatgccagctgcctgctagtagtcaatggtgaaaacaattcatgcccaaagagaacttagggctgaatgaaccaaaaactgaaactcaagggtaatacaaaatttgactgggcttaggtttatttaaagtatcagggcaataagaagagaaggaatataaaatatttatagaaataaaaaataacatgagctcttatttaagaaaaaatgtatataattaagaagaaggtagccaggtatgaagctcatgcctgtaatcccagcactttgggaggccaaggcggacagatctcttgagcccaggagttggagaccagcctgggaaacatggctagatcccatctctacaaaaaagagaaaagttagccaggcatggtggtgcatgcctggggtcctagctacttgggaggccgaggtgggagaatcacctgaacctgggaatcgaggctgcagtgagttgtgagtgtgccactgaactccagcactccagcctggctgacagagtaagaccctatctctaaaaacaaacaaacaaacaaaaacaagaagatgatttttcagatcatcaacattaaaaacatatcaaatgagttatttttggtgaaacgccagtttgtaacactggcctgggggaaatatttgggctcaaccagtcaattctttctattctgttaaagtggaaagagcacaggagagatacatttgtacagaagtttctatttcagcccagtgtgggtctaaataagggctccgtggctgggggtacagagatgggtcctggtgcctccttacaaaacttgcaaaccagcaagaatcttacctcggaaaaatatctctgtgatctgtggcagtaagctttttctcaataaaacatatcagtagtgctcacacattaaaactgacaaacggtccctttgaatccttcttatacacataaagaaaaaaataagcatgccttagtagggcaatcagtcctggaatagtccagaatgagctgaattagggatgtctaaaatataaacttgatagagcatataagatctgtttcagtagaatatggttcttgccatgtcaaaaagaggctttttccccccaagatggtattatgaacattttcaaaaatacagaaaaattgaaacaagtttacagtgaacacctgtgtatctactgtttagattccaacagtgacatttaagaaactgcttcttaacaggtgattatcatattaggtgagcaattattcaggtaagactcatctgaatactatttaggattgtgcctatgtttaacctaagttataagtctctatgttttcttctggagtctattttgaagggtggactttgtacaggaaagacaatttgtttttttctatgtcatataaagcacaaaataaatctgaatttctaaatcttactaacaaaaataaattcaggataaaaagtaaatctaaagatatgctcaagattatgagttatccaaatcaatacccatttaattgataaaagctatcaaccatgaagttttattccaggttagtcctaggtaatatgtttttgggattctctgaaataagaaaattgttggtaagttatgagtcagtcaagcacttgggaatgagataattgggagctttccacagttactgatattgtacaaactaaactataatatttataaatcaagagatgttttaataggtgagttgtttttgggttttctgtgggttttattattttgttttcttttgatatattttaaatgaacattatataaatgttaggccttgtttgtcatgaacaagacattgtacttttctataaatgaaaaaaattcaacttcaataactctatttttaatcaattatttctgatgtgcctagtgtaaaagtcagcttgctaacttctcagcaatttgaaatgcaggtcaaggtcagatgacattacaagagtgacagagaaaacctaattttagtctccatgaaactgaagaactcaacacaaatgattactgaacactcagcccatgtttggagttgtacgcttacaaaggcatcctatcaggaaggagcaagtactgcagaatcgtggaagaagctagtgtgttctcaggtgctccaagagctgtggaaaatctcagattcagactatcgactcctcaagtacattcaaagaacgtgtatttgcaactctagtataaactcattacagcagaagttctgagaaaatagccaatacagctataagtagcagaaagtggcattttccaaaaaagttaatgttaatactttgtttaaaagcatattataaaattgtcaatactaagtagaatctaattactcctgaaaagcatttctcatttaaaaatctattcattaaaatatgcaccaaaatgttgatcaagttatttctgggtaatagaatgatagatgtttttaaattttattttccataatgtttatattttctacaataaataaagatgacttttataatcagaataaatgaaatacatgttattaaaaaactagagtagtcaagtttctttttttcccaccaggaattttaggtttttagttgattagacttcaaacaaaggtcaagagtaaagacttttgaatcatattaaattaaagatgtctcatagatattttacacattggtgagatgtaaagtagtgagagagaagtcctgagaagccagataggcatacacatcatttaacacctatgatggtattatttaaaatcaaatcattaatagaatcagcatgatgcagtttgcagaagcataactagagaagacaagaagtctgccttacagagcctaagaagaggcatggcaaggaaaaagcaagagagagagaaagaagcagagctcttagtagatgtaaagaaatccacttcgtgccagtttgcaaggaaattttcctttatgaagagcagagcacttaatagatgtaaagaaatccacttcgtgccagtctgcaaggcaattttccttcacgaggagctagctgtttgcacagcgccctcttgtgaagagaggttttcgtgactgtaccttcaccccaagagccaaaaacttcaagtatccttccagagcaattgcttagctttcatcagctgaggattaacttccaaggctttttgaggatgcatgtatgggtatgagtaacacacagacttgacatccgaattctctattattaaatgtgcacataaatattccacagagttgtgcttcttaatgataatactttaaaaagaacttcctaaaataggaaattagcatctatgtttgttcccatgacttgtgaaacttgctcttttgctctgatgaatgctgtttctccattcggtaaatgaaaattgaaaaattgaaaattggggactacattaaaaatcaaaaattgtccattcatcttaaaaatatggagacatttatttataaaacgttagtatgcttatgagtgccatttgaaaatgcattaggcacctgaaatttcatatgatagtcactgacaaaaatattgccatttgagtaatataagaattagagacatttggtgtgcttgatttagcacgttaattagaataaaaatctttattcatgtaaatgattccactgatttgcaattatctggataactgctcagcaggaaaaaccaaattttggatacttcttgcaaaaaagtaaattactgtggaatatgatacaatgtatgcaggaagagttgtgctttatgtgatattctgactcaaaacaggagagaaaatgatttcttctcacattcagttgaacaattgattgggaagtgattacaaacttcactttgcctgtcagtgtctgtgctatgtatttattgaggagctcattcattgctactcactttcctaaccaaaccatcatgaaaaacatgcttagaaccctgagctaggtaaaatgagaatgtgtggcttagcacaaatcataattaaaaagcaatggcaacaccaaaggatgggttggggtgcccctccataaccgctacaaggttttccaaacccaccacaaataaatatgtgtcaaacataaaaacgatgtgctttctatgtaaatgcaaattcaagacaagtccccaagatcccttagcttccaatcaaattgtcatcacttctcaatctactactatctagaaattctactgtggcctttgctgaaagttcagagcattcattgatgagtatcattgtattcatgtggaagagatgacatgaggcagacaaggacggtaacaagtctgtgtaggaatctacacatatctagtgcttgtgcaatgggcttttgaataggcttgtgaaaaagactaacgcctcccaactgtatctccatccctgacattttgcctggttttcagaatagtatatcaatctccttcttggagattgacatatgggtatttaatagtcttaggtttaattccttccagggagactgcaaaatattggagtgcgtagtttatttggagaagaggcaggaaggcgattctaggaaatcaaagttaggtgatggagaagtgggatagcaaaggaagaaaagttaatacagtgtgtattaataagcaggggcagatggggcccaatctccccagggaccttttgtgggaccatatatacacatgcctcaggactgtcccactggagaatgtggaacctggggtatatgagcaccaactctggaccctcaatgttggagtgttgccactgggaatgttaaaaaattctgtaaacggtctcagcaggctcctttgtactgcagaaagcccccaggtgcctgagatgggaaactgactgagtctgccatagcctcaggtgaactctatagtgggtggagggaaatggggcagcactccaagcattttccacaaacaggactatcaaactcaaaatgctcaaacagaaccaccccaccactaaacctactcctcccttgaactcctcaagctcaataaataaaaacacacatttccaatttgttcaggccaaaaacccttgaattatctttgactcatctctttttctctcactctatgtaaaaatccgtcatcaaacacaattagctctggtttcaaaacattgccagaatctgatcacttctcgccatctccactgccatcacccgggtccaagtcactactgtctccttccaaggctattgcagtggcgtcataaccattttccctgcttctactcttgctcctactctattcttcacagagcacccagagtgatcctttgaaaatgtatgccatttctctgctcaaaaccctttactagtttccctctccatttgggataaaatccaaactcttttccatggttttcaaaagccctctcctctctttatggcctccttttctattctctttcttgcttactcagttcccacaatactcaacttcttcctgttccttaaacacaatgtgcctcctcctaaggagctttgcacttgctatttctttttcttgaaacactcttcctttggaaaaatgcataattcactcattttgttaagatttaaatgtcagtttaacagacagggatacctattctgactttttaatctaaaatcacactcgtattactatttctttactctgcactaatttttttcatagaactaaccatcacgacacacattttgaatgtgtttatgtatttcatatattttgtactatcctccccacaaaaaattaaattctttcagaggagagacatgttgattcactgctgtttggccaacaactagaatagggccagatagtggtaatggttcaatatatatttgctaagtgaattaattcactgttctgagagccatatgagataaatattgatacttattaaacacttaaacgttatgattgatattggcctataaaaagtgtaagcagcctctgctcaccagaagtatgaatatccaaggtgtagtgaaattatcagagtttagacctgtaagcttgtccaacccgtggcttgtgggctacatggcccaggatggctttgaatgtggcccaacacaaattcataaactatcttaaaacatcatgagactttttgttttgtttttgctcatcagctatcatattggtgtattttatatggggcccaagacaattcttccaatgtggcccagggaagccaaaagattgaatactcctgggagggtatattactgtattatgaacaatgatagttaggaaaagaaaggaaagaaaggttgagactggactgtgaaggaacttgaatgatacgttaggagtgggacctttgttccatttagaagtgaaaacttaccaagtttctctgaacaagggagtgaaataataaaagcagaattaatttcagaacaattgatattttgattctacttgcaaggacttgagcaggaaagattagaggcagagagacaatgtcgtgaactttcccccactcgaatcctcctttttcccagtattcaagacactggcatatgtactggcatatatgtactatttgcatcttttaaacttagtttgaagactactgtatcatcaaatatttttcatactcagttaaggtggtttttgatcttactgcgatgttaaactaccacactttgtttagctgaaaaaaaggtctgtccatggtttctctggattggaagtgaacctactatagatatgaaaagctcatattcattcttcttcaggttacctaaaaactaataactaaagtattagaaaaagataagtttcggtatgaatatactataggttatctggtgagacacagttatgagtcaacgggaataaacacgtcaaaggcatctgtagtgcttagcaaagtttctttacatctctaatttgtttcttacccagggcaaaatgcaaactgcagtcttcttttctctaaaggagtattgtaaagaaaaagagtggtatatgctcatgttctactggactctgaacctcctggggctgtataaccctgggactgcccagcacagtaggagtgaaataaatgtatgttaaatgaatccatcaaacctcttagaagacagactccagggaaatttcattattttgttctaaattatgctttccctcatgtaatgaatatttaattctgttttgttccagaaaggactcaaggcttctctatttcctttagtaattagcttaaataagccaagtcatccatttctctacctacccaatggacaacagaagaagcttacgtgtctcatagctttatctgtaccttgatatgtttgagaatatttcatatacataaaccagcaatgatcatttgaggaaataaaccagtaaactttacaagcaattgtaatttgaggatataaactttaaactctagaatgttggacacatctttgaaaataattccaaataactaattgaatctattagtttatgttacaagccaatttggttcaaagttttaaaatgaagaaaaaaattgtataaattgaagttttaagcatagtttaatgaaatcagctagtctaaattcaatattttcactcagttcatcaaattatttgaaaagtaaacacgtgggctgtacagagaacagtgaatcctcccctaccctgagctatcactcctgcttgtggggcacagagaaggcattcagacctgtgcctgccaccaccctacccccagccaacaccacctccagtgtgactgtgcacacaggctccagcaagggcctcctgcccacctctgtaagctgcattgcctctgccactctggtgaacatctgcaaggaggcaggcacccccacacccactagcacttcactgcagctgtcccatctcagcacccctagctgagtggattccaaaacttgaagaatgagaagacaaagtttgggcctcatacaagtcccccagagttagtgcacacagtccagaagttgggagctgagtgttggacccctaaaatcttccagaaatgaagccaatcagctgaatccacctaataccacaatcaaaccctcaaggtcatcaaataggataaaaggaaaaaaaaaacattcaaatgtcagcaacctcaaacattaaaggtagaaaagtccacaaagatgagaaagaatcagcacaagaaccctgaaaactcaaaaggccagagtgccttttttcctccaaacaaccgtgtcccttctaaagcaagcttctaaaccaggctgagatggctgaaatgacagaaatagaattcaaaatatggattggaatgaagatcattgaagtacaggagtatgttgaaacccaacggaaggaagctaaaaatcatgataaaacaatgcaggaactgacagacaaacagccagtatagacaagaatgtcaccaacctgatagaactgaaaacattattagaatttcataatgtaattacaagtactaataacagaacagcctaagtggaggaaaaaatctcagaaatctcagagcttgaaaactggctttctaaaataagacagtcagacaagaatagagaaaacagaatgaaaaggaatgaacaaaaccgagaaatatgagattatgtaaagagactgaatctacgactcattggtgtccctgaaatacatgaggagaatgaagccaacttggaaaacatatttcagagtgttatccatgagaacttccctaacctagttagagaggccaacatttaaattcaggaaatgcagaaactcctggtaaggtacttcacaagaaggtcatccccaagacacacaatcattagattctccaaggttgaaatcaaagaaaacatgttaaaggcagctagaaaggtaaggtcacctacaaaaggaagcccatcagactaactgtggacctctcagcagaaactctacaagccagaaaagattgagggccaatattcacaattcttaaaaagaaattccaaccaacaatttcatatctggccaaactaagcatcataagtgaaggggaaataatatcctgttcagacaagcaaatactgagggaatttgttaccaccagacatgccttacaagaactcctgaaagaaacactaaatatagaaaggaaagaccattaccagacactacaaaaacacactgaagtgtacagaccaatgactctataaaacaaccatataaacaagtctgcaaaataaccagctaacatcatgatgacagaatcaaattcacacataacaatattaaccttaaatgtaaatggactaaatgcctcaattaaaagacacagagtggcaagctggataaagaatcgagactcactggtatgctgtcttcaagagacccatctcacatgcaatgatacacataggctcaaaataaagggatggaggaaaatctaccaagcaaatgaaaaacagaaaaaagcaggggttgcaatcctagtttctgacaaaaaagactttaaaccaacaaagataaaaaagacaaagaagggcattacatcatggtaaagggttcaattcaacaagaagatctaattatcctaaatatatacacacccaacagagagaaacactcagattcataaagcaagttcttagagacctccaaagagacctagactcccacacaataatagcaggagactttaacatatcactgaaaatattagatatatcatcaagacaggaaattaagatattcaggacttgaacttagcactggaacaaatggatctgatagatatctacagaagtctccaccccaaaacaacagaatatacattcttctcattgccacatgccacatactctaaaattgatcacataatcagaagtaaaacactactcagcaaatgcaaaagaactgaaataataatgaacaatctctcagaccagagtgcaatcaaattagaagctaaggctaagaaattcactcaaaaccatgcaattacatggaaattgaatgccttttctcctgaaatcctgaatgccttttgggtaaataatgaaataaaagcagaaatcaataaggtttttgaaacaaatgagaacaaagatacaacataccagaacctctggaaaatagctaaggcagtgttaggacagacatttatagcatgaaatgcccaaatcaaaaagttagaaagatctcaagtcaacagcctaacatcacaactaaaagaactagagaaccaagagcaaataaattccaaagccagcagatgacaagaaataaccaaaatcagagctgaactgaagaatattgagacacagaaaaccattcaaaagatcagtgaatccaggagttgttctttttttgaaaaaattaataaactacatagaccaccagctagattaataaagaagaaaagagagaagattcaaataaacacaatcagaaatgataagggggatattaccactgaccccacagaaatacaaacaaccatcagagagtattatgaacacctttatgcacataaactagaaaaactagaagaaatggataaattcctggacatacatactctcccaagactgaatcaggaagaagctgaatccctgaatggactaataaaaagcactgaaattgagtcagtaataaatagcctaccaaccaaaaaaaccccaggaccagactgattcacagctgaattctaccagatgtacaaagaagagatggtaccattcctgctgaaactattccccaaaactgagaaggatggactcctccctaactcattctacaaggccagcatcttcctgagacaaatacctggtagaaatataacaaaaatttaaaactcagaccaatattcttgatgaacattgatgcaagaatcctccataaaatactggcaaaccaaatccagtatcacatcaaaaagcttatccaccacaatcaagtaggcttcatccttgagatgcaaggttggttcaacatatgcaaatcaataaatgtgattcatcacataaacagaactaaagacaaaaaacacatgattatctcaaaagatgtggaaaatgcctttgataaaattcaagatcgcttcatgttaaaaactctcaataaactaggtattgaaggaacagccctcaaaaaataagagccatcaatgatatacccacagtcaacatcatactgaatgggcagaagctggaagtattaccattgaaaatgggcacaagacaaggatgccctctctcgcctttcctattcaacattttggaagtcctggctagggcagttagataagagaaagaaataaagcacattcaaacaggaagagaggaagtcaaactatcccagtttgcagattacacgatcctatatctagaaaaccacataatctcagcccaaaagcttcttaaactgataaacaacttcagcaaagtttcaggatatgaaattaatgtgcaaaaataactagcattcctacacaccaacaatagtcaagctgagagccaaatcaggaatgcaatcccattcacaatcaccacaaaaagaataaaatacctaggaatacagataaccagggaggtgaaaaatctctacaaggagaactacataacactgctcaaacaaatgagagacgacacaaaaaaatagaaaaacattccatgatcatggacagaaagaatccatattgttaaaatggccatactgcctgaagcaatttatagattcagtgctatttttaataaattaccactgagattcttcacagaactagaaaaaactattttaaaattcatatggaaccaaaaaagagcccgaatagctaaggcaatcctcagcaaaaagaacaaagctagaggcatcatgccacccaacttcaaactatactacagggccacagtaaccaaaacggcatggtactggtacaaaaacagacacatagacaaatggaacaggatagagaacctaggaataagaccatatacctacaactatctgatctgtgacaaacctaacaaaaacaagcattggagaaaagattccctattcaataaatgatgctgagatagctggctaactatatgcagaagattggaccccttctttataccatatacaaaacttaactcaagatgtattaaatagttaaatgtaaaacccaaagctataaaaatcccagaagacaacctaggcaataccatcttggacacaggaacaggtgaagatgtcctgacaggccaggtgtggtggctcacacctgtaatcccagcactttgggaggctgaggcaggcagatcacgaggtcaggagatcgagaccatcatggctaacacagtgaaaccctgtctctactaaaaatacaaaaaatcagctgggcgtggtggcgggcgcctgtagtcccagctactcaggagactgaggtaggagaacggcgtgaacccaggaggaggaggttgcagtgagctgagatcatgccactgcactccagcctgggtgacagagtgagacacccatctcaaaaaaaaaaaaaaaatatgtcatgacaaagacaccaaaaccaattgcaacaaaggcaaaaattgacaaatgagatctaattaaactaaagagctcttgcacaggaaaggaagctgtcaacagagtgagcctataaaatgggagaaaatttttgcaaactattcaacaaaggtctaatatctagcatctataaggaacttaaacaaatttacaagaaaaaacaaccccattaaaaagtgggcaaaggacatgaacaggcacttttcaaaagacatacatgcagccaacaatcatatgaaaaagtcttcaacatcactcatcattagagaaatgcaaatcaaaaccacaatgaaataccatctcacaccagtcagaatggctagtattaaaaagtcaacttatacactgttggtgggagtgtaaattagttcaacaattgtagaagacagtgtggcaattcctcaaagacctaaaaaagaaataccatttgacccagcaatcccattactgggtgtatacccaaaggaatagaaattattctattataatgacacaggcatgtgtatgatcattgcagcactattcacaatagcaaagacatagaattaacctaaacgcccatcaatgatagactggataaaaaaaaatgtggtgcatacacaccatggaatactctgcagccataaaaaagaatgagatcatgtcctttgcaggaacatggatacagctggaggccattatctttagcaaactaatgcaagaacagaaaaccaaataccatatgttctcacttattagtgggagctaattgatgtgaacacatggacacaaagaggggaacaacacacactagggcctaccagagggtagaaggtgggaggagggagaggatcaggaaaactaataggtagtaggcttaatacttgggtgacaaaataatgtgtacaagaagcccctgtgacccaagtttacctatataacaaacctgcacatgtacccctgaacttaaaagttaaaaaaaagaattcagaagaagaaaatgaaagaaaagtaaacccgagtgtatagtcctccatctcctaggttctaaggattaaaagctccaagaaaagtgttagaaaaatacatagtgaattaagaaaaaattattccttatagttccaacgttgtgtctttgcttatactatgttcacccttttaggtatgtttgtacaaaatgaaaaaggaataaaaaccaacattttagaggataattcatgctactcaaaacaatcacgaggaaaagctgggctgaaactagtgacaagcttttgcattgtgccacattgctgtcacatttttgcccatattatttatgagatttcttcaaaatttttataccaggtcattcttaaggaattctttgctcaggaaaaagtccaagttagcatccttcagacccctgctgtctctccagctcctctccacacacatccatttatagggaaaggcaagggcagaaagcagatttagaagagaaaaaggatagaggagcatgagtgtgtgtgtccacgtgtgtgtgtttgtgtgtgtgtgtgtgtgtgtgtgatgtgtcctgctttaccacagtccagggagcttacagggaagtccatgttcaatatcagcactgcaggcctctccagcaggcccttgttccttcctggtcttcactgcctagtgcacggcaactaagccacaacacccaaacctgagacaaatcatcccatcccagggctaaaaaagtgactctaatgatgtgtctgcgtaacaatcaataattcatttaaattgattgcctgatacataaataatttccttataaccttctgacttttagcaccactgatctaagaatcacacctaaaaaagtgctgtcagaatgcaaaaatagttttctgtttgaataatacttattttttatgaccatatgaatgatgaatattcatgatagaaatttggaaaattcagaaaattaaatttttttaaaaatcatctataccgagaggcaacttgtaaatctggctcattttctttatttttatatgtatatacatatatttacgcatctaattttaacattcaattgagatttgatgtacataatttttggattctgctttgcattcatggtttactataagccattttctctatcacttaatgtcatttgaaaatatatttaatggttgacaagattctattggctgggtctaatatgaaaatttatttaaacattagttcatgtgaaatacatagaatatacctaggttctcaatattataggtatttttacggtgaatatctttgaatataaatattttaatatcccaaattacttccacaatccaaatatctacaagcagaattactaaattaagaggtaggattttaaaaatatcaatgtttattttagatttaggggctacatgtacaggtttgttacatgagtatattgcgtgatgctgaggtttggggcagtgctgatcccatcacccaggtggtcagcattgtacccagtaggtagagtttcctcccttattcccctttcccctcctggcttttggaatcctcagtgtctactgttaccatctttgtgtccatgtgttaaagggtaggagtaattttgaggcttcaagcttctgctgatttttaagcatttttctgaaataaaactttcaaattagttcataaatcaatgtaacagatgacatctgtcaatatacattattatatgcataaatcatatgcataaataacatgcattattttattatgattttataaaagattgacacaacataattcaaaataacttatttactacaaataggactcaccacatgaaaattagaatctaaagcaattaaaaaaactattaggaaatgaaaaaaaatcccatcatataaatcctcaattttggccatattttatgaaagggccaaaagcaatcaaaaaaaaaaaaaaaaaagagagagaaagaagtgagaaagaagtaggaaaaaaagaagaaagacatgtggctattattacagcaacatgaaggtggtcaaccacttcaagtttttgtggtcagtgaggtcacaagagctacaggctgacatttcaaacaaattatgcacattgaggtcacatcgctctacttcaggcagtttctcataattgtagtgttctgtttacaagaggtccttgacttaaaaatgtccttttgtgccctctagtgtttaaattcatcaaagcttttgagaagttcatatcttgtttctgaactccagttgaacaacatttcattcttagaccaagtgtttatctgtatctgaagggggccaacatacatcttgttccaaaatctctaaagtttacttaattttttttttatttcaaagggagctaggtaggggttggaaaactaccacagagcaaatcctgcccactactttttttcattttgtaaataaagtttattggaacatattatgctcattcattacagattgtctacagataactgcatttgctctgcaacagcagagttgagtagttactacagagttcttgtggccccaaaaggctaaaatatttactatctggcttgtcacagaaaaagtttgctgaccctggagctagagctctgataattagattggatgccatgacattttacaatgccctttaattccactccctttccatcaacccccggaatactagttaaaacaaagaccattgtaggccagtccattagctttgtggtccaggtacaaactttgcagttttagtgaaaccatttgttaatttttatttttctaatatttacttagcttgataatatcaactccgttctgatgacttcgatattaatatgattatattggagagaatataatgagatcaaatcgctttacccatcaagaccaggaactgaagaacttcttcctcctttgctacctcatctcttagctagaacttaggtgagtagattagtatcctcattcctctttatttttatataattaataataatatttgcaattattttgagaaacatatatctttttttgaataaagtaaacataccgtttataattaatatggaatttagtttaagttcatgcttgatttaaatctcacacaatcacctcttttatatactaatgaaagcacggtgcacaataataaagccgtggtcctatgtggtcaacttacaggctaccttctttcctcagtgcaaatatcacgtctttctaagtccctctaatattttatcctctcttttgtgtatctagaagctttactgaaacttcctactccttatctgaaatagttgacatatagttaataagagcttttttccaggaagtggatctattttattgctttctaacttaacatgtttcagaatagttacagccattttttttattcaaaggtacatgtcagcaatagtctggccagaaattttgcacaataataggagaaaacaaaaaactaggggcttagaaaagtgaatgaaaacagttttcagttgattattttgttcctgaaaaggcatcttttcctcatgacatgcattcatggccattgtagattacatgcctggagctgcccttctcagcctttcaacctctcattacatgcatattctttcctctgttctttacagtcccccatttccctgacacagaccccgcactacaatcctcttccttatacttgacacagaaataatttaaacacaaacccaaatacaaacactgcatagatttaccatatggaatcacatatgtaaaatttctgaatcaaataacgcaaacccacaatgttactttccaaatatatacaacaacaacaaccgaatgggtggtgaaacatattacttatgaaaggtgctcaatgttaaaagcaattaaaataaaattcagaaaaaagtgataccatacctctattccacaagcaaaaaaaatttccaaacttacctgcaaaagaaaagaacaataaatctcaaatcagaggatattttatttttttctagtaaatttggcaaaattgtcatcataaatatagttatttcttaattatcactgtgtatatcactctctgtaaataatgcttattggttcttatagataccaacagggctggcagtgacattctctaaaggccaattctcatagtccatagggtcattttccatatgtaatctgcttcataagaaagtttttagaacaaaaacttaaacaattccctggacccaggaaatctgcattacaagacatttttgggggtgctaaatccaaacaatgaaaaaagaaaaggttttggggtcagactgacctggactgaaatcctagttctactgtagcctggtaactcaagccattttatgtctgttgagcctcagtattttcgcctataaaatggggacattatatttatgtaattcaattattctaagcattgaagtcattttgtggcatgctgtagacactcaaaaaatattgccttcacaccatcctgtaagctttattttatgccaatactttgctgaaacataaatgcttagtgcggtatctaaagcatggaagagctttaagcaattaataatggatagaaaagtaacaagttttacatttccatcttcatagtgtgaccaagttggtttacatgaaatattaatcatcttctagatgctgggcaatttatttcccggtgtaaattcaagtgtttcactcagagttcaatcaattaactgagagtatggcagtctttagcacggtctctacatcccatatattcacatgatgccccctattatgtccccattcacgatctcacttatgtcccctcactgcagcctcactagccttccagccattcctggaaaaatcgcaagcctgctccagtctcaggatatttgcattccctgcccatttgcccacgaatctatccccactccccttcaatccttgcctcaaagggccctttctaacctgatttccctattgcaaattctaaccatattctcagcctctgtattgaactcccctgctattgcactatttgttccctagcactgagagccttctaagacgctacacaatgtatttatttactatgcttactgagtctctctgtccctaccactccatataagctacacagaaataggggtgtctgttttgttcactattgaatacccagaacctggaacaatgcctggtaaatagaagctattcaaaaaacatttgtttaaggactcaataatacacatatgaaaaaaccaaatataaaaatataaattatacatatataatccatatgtatatttgtttatatacatattttgcttatatacctacatatttatcacacaaatatttacatgctgattatccataggaatttttaatttttaattaaatttttagctagaagtaaaccatttttgtttttgtttttgtatttgttttgagatagggtctccctctgtcacccaaactgaagagcgagtggtgcaaacacggctcactgcagtctcaacttcctggactcaagcaatcctcctgcctcagctttccaagtagctgagactacaggcccatgccaccacacctggctatttttttatttttttagttttttttattttttgaggagacggtgtcttgccaagttacccaggctggtcatgaactcctggactcgagcaatcctcccacctgggcctcccaaagtgctaggattataggcgtgagccactgcgccaagccctattttatttttacttaacaattattatgagagaaattgaggcaaccattagcgatactggctctctctttgtagctctccaccctcaggacacatgtagatgcacttaataaccctcttgtagttgaatggagccacgtgactaattctggccaatcagcagccaagcgttgattcgctggtgtgagactctccatctcttcccctttctccttctgccagaaggatcaacaaagtccatgatggtaactctgtcagtttctgtaccagagtgaggaggctgtgcagcagagctccctgtcgatgatatgtagtatgggaaacaacaatcactatcatctttgttgttacaagatttagaggttgtcagggcaatttaactcacccatcaggataaatagagaaattatgcacatataattttaaaattatactgaaaaccttattcaaaaaacagtctgcaaaactatactatatatattcattgtgaatgctctttctcaagtcattttgtttctgctggtaattaactctataattctaagtaatatgcttatactgggtttttttttcttgattttcatttttttagccattatctattcatttcttatcataataaacatttaattatcttatactgatctccagttcccttttttcacctagttacatcacaatttttagttaaattaacaatcactgtttacatatttttactatatataaatcttatttactatgtatgtaatatatacatatttgctttacggctcaacttctgttttgctagtagttaataattgctttggttcttttccaaatggtactcatatctgccacccctctcagatgctctagcaaattggataatctatcaatttcattttctcttttcagcctcctcctcaacaccttgtactcttgcttcaatctgtacttctcagctagttgctttctaggcccgctagaaatctgacatcctaagcattctttctgttatttcccgtgttgattattggatctcatgatttcctttttgatagcttcctgctttttgtgggtcacattttatagaagctcaagtggcaaatgaagtgaatagtattaatattttacattttttggatcttgcatcactaaagatggctttattctgtctttacactagttcatagtttgacttgctaaaggagtctatgttgaaatgtaaattccttcaaaatattgaagccattactctattgtactccagcatctatttttttaagtaatttatcattaatctgattactttcattttaggtagagggtggggtaggaggcaaggtttcagcattcatgatgctgactcttctggatgttgaaatgcactgcccagaatcccctcagcatgtgtttctccagtagagggtatactgctcttgcccaagattatacccatttatacagagcagtctgcagacaatggctatttgataaacgggaaggagatagtatagagtcctaaccccttcctctaagttttagaaaccccaactgaaccagaagaggcctccattgagcctttaaccctgttcctactcttcttcctgtggtgctcacactgagaacatttccccacaaacaccctgcatcccaatctctatctatctcggagtatctcagggaaccagatctgcaccacagacattcccttcattccttgtttcagccccacacctcatccctgcagggtgctacatcttctctctcagagtcctgaccctttctgagaacatttctctagaaaataaatcttgggtatttctgtggtagggtgtgcgggtagaaacaggagccttggataggatgtggggaggcagccttctcttccattctcacacctttccttttaaattcctccatttaattacagataatatgaacatatggtccattcactacaattgattaggagtccattcttttagattgttggttcatctctgttggcatgaattaaaaacaattttatctattaaaagtagaaaaggtataagaacattttccaaactgttacattgaatactagtttttgagatgttaagagtccagttgaataataaaaacaagaaaaagactagagagtcaaataatttgtaaatatggcttcaaaatcttaaagaaaatatttctttttattacgtgacttctaagagctttaaatatactaattggaatgtgactattctagaaggtggagagcatttgcagagtaattagaccattcccctgtagacggcagttaatatcagagtaagccatgttttagaatatgacttgggcctgggcatggtggctcatgtctgcaatcccaggatttctgggaggctgaggtgggaggatagcttgagcccaggtactccagcctggggcacaaagcaggaccttgtcaagaaagaaagaaagaaaaagaaaagaagggcagggcagcgcaggaggaagggagggagggagggagggagggaaagaaagagaaagagaaaagacaaaaagaaatatgccatgggaattgctgcacaaagcatcttaatctaagttttatactaatcacagggcttctattactcctacaagaattcctttaccttagctggagaggtaaaatgaattgctaaacacttaaaaaccagcatgactgtaccaaggaataaaacatgttaactctgtttcaggtgagtgctttctccattacatcaaattgcctgcttacttaaaattaatcataatatttgaattaggatcacgtaatgtaaaaaaatctcatttcccagaatattctacactagaaatcaatttctcactatcctgctgaaatttgtccaagcaatctgcatatatttttaaatctatcttttttatctctagttcagcatgtgccataatgttctctgtggagcacccaaccccattactctgtaagcaaacaaaaagttaactatttaataaagtttggaatattttgcctatgtatctccttcctggatatttacaatatttatttagcttccagtaatatatcagtttaattttatgaagctcagcttatttgaccatgcaaccattttgcaggtagtacctgttgatattagcattccacaaaacctactttgggaaatactaacctaggttactaaggttcatactagcaagagatgaataagactaactattataaataataatggagaaaaaaagagctccaatgatctgacacagagaaatggattttatgaagggacatgatttctcaatgagaaagaaagaggaaacagaaaactaatagttccattgtatttccatagttagggtggcgtatggttaggattctttgttcagttttataaacctcgtactgtcatgacttcattaacccaaggctaagctgtaattctaaaaggtatatatatatttaaaaattgacaaataagaatgtatatatttatgatgtaaaacattttatttacatagatgtatacattgtgaagtggctaaatcaagctaattaatatatacattacctcacaaacttatctttttttgtggcaagatcactaaaaatctactcttttagctattttcaagtatgcaatgtattgttgttaactatagtcaccctgaggtacaatagatctctggaacttattcctcctgtttaactgaaattttgtgtcctttgactaacattgccccagtcttcagcccccacccatcagccctggttaacaaccattttattctgtttctatgagtttgacatttttagctttcacatttaaatgagatcatgtggtggttgtcattctgtgcctgacttatttcacttaacataacgtcatccagattcatccatgtgatcccaaatgacaggatttccaaaatatataaggaactcaaaaaggtcaatagtatgaaaacaaataacttgattaaaaaacaagaaaaggatctaaacagatgtttctcaaaagaagccataccaatggccaacaggtatatgaaaaaaatgttcaacatcacttaataatcaaggaaatgcaaactaaaaccacaatgagatatcaactcatacctgttagtacaaaaaagatgaaagatggcaaggatgtggagaaaagggaagatgtttacactgttggtgggaatgtatattcacatagccattatggaaaacagcatcgaggttctttaaaagctaaaaatagtactaccatattatccagcagtttcactactaggtatatatccaaaggaagtgaaatcagtgtgtcaaaaagatatttgcactcccatgttcattatagcattatttacaatagcaaagatacagaatcaacctaagtgttcatcaacaatgaatggataaagaaaatgtggtacacacacacacacacacacactcacacactagaattctacccagccctgaaaaagaaggaaatccataataacatcttttattttggatagaatggacatcaagggtatttgtgacagatataccatgaatgacatgaacctaatattaaatatttatttttgttgatgtaaggaacattaatagcctagaaactataagttttaagatttagcttaggaactcaaacgatgtagcaaatatatttcatcatgatttgatctatctatatcaatcttataaaattgtgtgagcatgaggttttggggatgaagagataatggaatcaaattttagcttttacccccaaaccttctagactttaattgtatattatgtaaaatgtaagtatttaaaatatgaagttcatgaatgggttcatgagtcaaccgcaggggagttggtgaagcccctgaaactatatgaaaaattgtgtgtacatttacatttttcaagagagatttgatctagtcaaattttcaaagcaccctgagatacccaaaaagtgatagaccccttaaagagataatctctaagaattctgtctcctttttcattaacagttttataagctttcttatgaaaagtatgtcatgtttatgatatttagtaatttctttgctgagccttcatttttagctattcaagaaatttaaaagtaaattgtaaatattacaattagtttctaaggattgtttaaaatatcattaattatataaaattttaatatatattttcagttcttcagctaggacagacagagcctctttaaaagattttatttgatgctgggaagggtgctgggaaaagagaactcctatacactgacgatgggaatgtatattagtacagccataatagaaaacagtatggaagtttctcaaaaaactaaaaataaaactatcatatgatccagcaatcccaccactaggaatttattcaaaggaaaggaaatcagtatattaaaagtacacctgcacccccatgtttattgcagcactattcacaatagccaagatatggaatcaacctaagtgtccttgatggaactggaggtcattacaataagtgaaatgagccaggcacagaaagacagatatggcatgttgtcactcatatgtgggagctaaaacagtggatctcttggaggtagagagtagaatgatggttaccagaggctgggaagagagaggtgggatgaaaagaggttagttaatgggtacaagcatatagttagatagaagaaataagttctagtgttcgataacacagaaaggtgactatagctaacaataatttattgtatatttcaaaatatctggaagagctgaagtgttcccaacacaaaaaataataatcgtttgaggtgatggttatcttaaataccctgatttgatcatcacacattgtatgcatgaatcaaaatatcacatgtacctcctaaatatgtataattattatgcatcaatacaaatatttacagtaaaaaggagatttgaattgtaagaaaaaaagagaagaaattctatttttgcaacttataatagttattatttgtgtgagatactcacttgcccacaagatggcgctctctaattttggatatactattttcccaaaccaatttctcaagaagttatttctaaagtgttctcttccctgaaaaataatatttacaataaattattcttcactactgtttgattttcatgcttgaacatctaacaatgcatgacaaagtatatgttaatgtttttgtgtgagtggattgatgaatggatgtttcagacattcacagaatgtttactaaatttctgctgcataaacagctttgcacagtggatttataaacaaagaaacaaaaggtgttaaagtataaagagcaaatcagggttactatttttcaagttaatatttttatatccaagagtttcatatttaaatgaaaaatgattgttatagacatgtaaatgtacagcaaagagaagacatcggttcagttaggtaaaagaccttataagttgttgtgacttatgaagaactttaaggtttgtatgagaaggaggtaaggggaagatatttaagaggcggcaaataacataagaaatagcttgaaattatgtagtcatgccatcccaaaataaaatggcctcccattagataaggctagatgagttacagagggtggtaaaagtcactccaagaggaagaaaaggtaactaatatttactgagaacataatataactcatactgttatttaatgatctttccccacccttgaaaatacgtggatgtgcctcttattagagtgttagaattatggtgctatatttggatattttgagtaggttgcacttccctaaatgttgtactaaatcccagtatacagtcaccagaggaatagagatttcccagagaggaaatcagagttaaggaggtgagccttaagtaagcataggaggagactaaacttctctgtcttgattctcaatctcttgagtaatgactatgtcttgtggagccctctcttgtgggaaagttaaagatggcctctgctgtccagtgtgaagagggagtcagaagaagagtttctcctaggggacttcatttgaataagatatctcctatgatagaacaaattatctagtttcatgttactttgattctacatagtttgtcagtaaagtgttgctttaaaattcctgctttgtctcagctgttaaacaaagaaaaggatttttttaaaacccacatttagatcaaattgacttaaaaagagtacctgtctgtccaaaggatgatggtagtgagaacaacaatgagaaagaccctgaaaaaaagaattctgcttctcactgatctctctttcttcccttattcccctaaagtcatctccaaattaggagtcagagggatcttgttaacatctgtttaaaggtctttgtttaataaggcaaagccactagtaagatgaatagagctctgagtccccttctgtttcatctccaactttttcccttattctccactttgctacttcactccagccaccaggaccttcttactgtccctccatgatggcaggaggactttttgtacctccttcatgtttgctcacatgctaccttctgaatgaggtctttcctaacaccacttaaaattccaccacccaccacacacacattcgttaacctcttctctaatacacttttcttcatggtatttatcacaaaatcttccccatacatatttttaaatatagatatataaataaatatatatttctatatattacatatatatataatatataaattattttcatctttcactcccagctggaatataaactccacaagggtagaatttttgtctgtttcattcactgctgtatttttttttacagtacagagaagaaagctcagaacatagtatgccttctgtgataatcctgagtgtgaacttgagtggatggaaggatacaaagtattgatcctgggtgtgtctgtgagggtgttgccaaagaagattaacatttgagtcagtgtgcagacccactcttaatctgggtgggcacaatctaattagctgccagcgctgctagaatataagcaggcagaaacatgtgaaaagaaagactggcctagcctcccagcctacatctttctcccatgctggatgcttccttctctgaaatattggactccaagttcttcagttttggaacttggactggctctccttgcttctcagcctacagatggcctattgtggaacgttgtgattacgtgagttaatacttaataaactaccctttatatatatgtgtgtgtgtctatatatatatatatatatattccattaattctgttcttccagagaaccctaatataccttgtcatatttattgaatcaactttttaaaagtctaatttctgtgttctcttgaaaaatcagaaagcctgccaaccctggcctatattttcacatgataacaactgtgaggagctcagaagtcactgcgcatgcaggtgaggatatatctataccctccttgcccaggatccccctgccttctccatttgaatagctcctggctcctgcagatatgtgagttgtgacctgctggaagagtcctgaaagggagagtgacaggatcaaatgaagactttcagtaagtcacctggaaatagtgtgtaggattaatttaacgagtctggaggttgatgcctgttagtatctgctgtcgaagtcctggcatgaatggatgaggacctatgtgatgtgaactcagctgaagaatgaaagacaggggaagtagagtttgaagaaaggattaattgaacctgaggatggattggatattaaaaatgaatgaaaagaaaaagtaatgatgactaaaatttctagactggataattaggaaaatgttaatttctgatgtaaaagggaactcaggaaagagtcaacctaggacaaaaatcaaaagacctacatatggaaagaaatatactgatttgagtgaacccaagcagagtttgaagacacagattcaaaggtatttgacaacaaaaaaaggactttgagatcaatgccagagatggggactcaattttgcatactgcttatatactgcctacgtaaaggcactttatgataaagaacatctcaaaaaaataacatatagaacaaggggcaaaaataggggataaaagagatgattcccaattattggtcaagtggttggagtgagaattaaaggcaaaattcctcttctccccctcaaaattacacacaactacacaaacatatgtgttaatgattttagtgtgttgaatctggctgcttccacactgcatgcatcctacctttctccattcacacctgagataatctcattctagtgaagtcttacattataaatgacaacaccaatatttagggacgttcctcttttttcttcactgactttgcctttccaaacaatatactttgtgaatcctctgagaaaaaagaaagtagtttgatctgctggtttttaggacaataatttttaaaggacttgttatttttggttcagacaccatgcaaaactcatcttcaatcaagggcaggtgccaggtacagcatcaagaaagtaacaggtggtttctcttcctctcctttcctctaaaacatgaataaaacaaaagttttagcatttcagaaataatctttttaattaaaagtggaagataaatgtgataaaagttttctttgagctcttgaaaacaagttcattctataagggttagaaatagtattttttatctgtcactagagccattgtactgtggggcctaatgtttcagattttggatactcatttctttcgattgaaggtgtcatcaggtgttttccacctttagtgatctcaagtggttccccttcagttgctaaaatatactgtgtcgtttgagcagtccaagacccacagagatctgctatctatattggcagataaatgacagcagatggaattgaggctgtgttctgtctcatcggcaagcctgcagccttagaagaagagatgtgcccctgaagcattatgcaggttgctcatccagaatcagtgtcactgtcatagtttgtgaaagggaaattggcaaatctctatacataataggcaaaatgcaaccctctcaattctcaaaggcatattctcttcactcacatttttgtctttttgctgaagggaggtttctgggccaagatgttctgacagcctggtattttctttttttgcccaatgtgtaagaagataattaatgttaccattaatgcatgcaatgacattagtatcaattcccttagtgatatatatgcactaggaaatgaacacaaaagttaattaacaatttattgagcatatactatattacaagtttactatacaattgtgctttattactattggtgaaaataatgaaagatggcacttttctattcttcaccatatacaaggcacagttccaaggatttaaaatctatcaactttatgaatctttacaacaggaggagccaagatggccgaataggaacagctccggtctacagctcccagcctgagcgacgcagaagacaggtgatttctgcatttccatctgaggtactgggttcatctcactagggagtgccagacagtaggcgcaggtcagtgggtgcgcgcaccgtgcacaagccgaagcagggcgaggcattgcctcactcgggaagtgcaaggggtcagggagttccctttcctaatcaaagaaaggggtgacggatggcacctggagaatcgggtcactcccacccgaatactgcgcttttccgacgggcttaaaaaacagcacaccacgagattatatcccgcacctggctgggagggtcctaccccacggagtctcgctgattgctagcacagcagtctgagatcaaactgcaaggcagcggcgaggctgggggaggggcgcccaccattgtccaggcttgcttaggtaaacaaagcagccgggaagctccaactgggtggagcccaccacagctcaaggaggcctgcgtgcttctgtaggctccaactctgggggcagggcagggcacagacaaacaaaaagacagcagtaacctctgcagacttaaatgtccctgtctgacagctttcaagagagcagtggttctcccagcacgcagctggagatctgagaactggcagactgcctcctcaagtgggtctctgacccctgacccccgagcagcctaactgggaggctccagcaggggcaggctgacacctcacactgcagggtactccaacagacctgcagctgagggtcctgtctgttagaaggaaaactaacaaacagaaaggacatccacaccaaaaacccatctgtacatcaccatcatcaaagaccaaaagtagataaaaccacaaagatggggaaaaaacagaacagaaaaactggaaactctaaaaatcagagcgcctctcctcctctaaaggaacgcagctcctcaccagcaacagaacaaagctggatggagaatgactttgacgagctgagagaagaaggcttcagacgatcaaattactctgagctacgggaggacattcaaaccaaaggcaaagaagttgaaaactttaaaaaaaatttagaagaatgtataactagaataaccaatacagagaagtgcttaaaggagctgatggagctgaaaaccaaggctcaagaactacctgaagaatgcagaagcctcaggagctgatgcgatcaactggaagaaagggtatcagcaatggaagatgaaatgaatgaaatgaagtgagaaggaaagtttagagaaaaaagaataaaaagaaacgagcaaagcctccaagaaatatgggactatgtgaatagaccaagtctacgtctgactggtgtacctgaaagtgatggggagaatggaaccaagttggaaaacactctgcaggatattatccaggagaatttccccaatctagcaaggcaggccaacgttcagattcaggaaatacacagaacgccacaaagatactcctcgagaagagcaactccaagacacataattgtcagattcaccaaagttgaaatgaaggaaaaaatgttaagggcagccagagagaaaggtcgggttaccctcaaagggaagcccatcagactaacagcagatctctcggcagaaaccctacaagccagaagagagtgggggccaatattcaacattcttaaagaaaagaattctcaacccagaatttcatatccagccaaactaagcttcataagtgaaggagaaataaaatcctttacagacaagcaaatgctgagagattttgtcaccaccaggcctgccctaaaagagctcctgaaggaagcgctaaacatggaaaggaacaaccggtaccagccgctgcaaaatcatgccaaaatgtaaagaccatcgagactaggaagaaactgcatcaactaacgagcaaaataaccagctaacatcaaaatgacaggatcaaattcacacataacactattaactttaaatgtaaatggactaaatgctccaattaaaagacacagactggcaaattggataaagagtcaacacccatcagtgtgctgtattcaggaaacccatctcacatgcagagacacacataggctcaaaataaaaggatggaggaagatctaccaagcaaatggaaaacaaaaaaaggcaggggttgcaatcctggtctctgataaaacagactttaaaccaacaaagatcaaaagagacaaagaaggccattacataatggtaaagggatcaattcaacaagaagagctaactatcctaaatatatatgcacctgcaggagcacccagattcataaagcaagtcctgagtgacctacaaagagacttagacttccacacattaataatgggagactttaacaccccactgtcaacattagacagatcaacgagacagaaagtcaacaaggatacccaggaattgaactcagctctgcaccaagcagacctaatagacatctacagaactctccactccaaatcaacagaatatacatttttttcagcaccacaccacacctattccaaaattgaccatttacttggaagtaaagctttcctcagcaaatgtaaaagaacagaaattataacaaactatctctcagaccacagtgcaatcaaattagaactcaggattaagaatctcactcaaaaccgctcaactacatggaaaccgaacaacctgctcctgaatgactactgggtacataatgaaatgaaggcagaaataaagatgttctttgaaaccaacgagaacaaagacacaacataccagaatctctgggacgcattcaaagcagtgtgtagagggaaatttatagcactaaatgcccacaagagaaagcaggaaagatccaaaattgacaccctaacatcacaagtaaaagaactagaaaagcaagagcaaacacattcaaaagctagcagaaggtaagaaataactaaaatcagagcagaactgaaggaaatagagacacaaaaaacccttcaaaaaattaatgaatccaggagctggttttttgaaaggatcaacaaaattgatagaccgctagcaagactaataaagaaaaaaagagagaagaatcaaatagatgcaataaaaaatgataaaggggatatcaccaacgatcccacagaaatacaaactaccatcagagaatactacaaacacctctatgcaaataaactagaaaatctagaagaaatggataaattccttgacacatacaccctcccaagactaaaccaggaagaagttgaatctctgaatagaccaataacaggatctgaaattgtggcaataatcaatagcttaccaacaaaaagagtccaggaccagatggattcacagccaaattctaccagaggtacaaggaggaactggtaccattccttctgaaactattccaatcaatagaaaaagagggaatcctccctaactcattttatgaggccagcatcattctaataccaaagccgggcagagacacaaccaaaaaagagaattttagaccaatatccttgatgaacattgatgcaaaaatcctcaataaaatactggcaaaccaaatccagcagcacatcaaaaagcttatccaccatgatcaagtgggcttcatccctgggatgcaaggctggttcaatatacacaaatcagtaaatgtaatccagcatataaacagagccaaagacaaaaaccacatgattatctcaatagatgcagaaaaggcctttgacaaaattcaacaaccctacatgctaaaaactctcaataaattaggtattgatgggacatatttcaaaataataagagctatctatgacaaacccacagccaatatcatactgaatgggcaaaaactggaagcattccctttgaaaactggcacaagacagggatgctctctctcaccactcctatttaacatagtgttggaagttctggccagggcaattaggcaggagaaggaaataaagggtattcaattaggaaaagaggaagtcaaattgtccctgtttgcagactacatgattgtatatctagaaaaccccattgtctcagcccaaaatctccttaagctgataagcaacttcagcaaagtctcaggatacaaaatcaatgtacaaaaatcacaagcattcttatacaccaacaacagacaaacagagagccaaatcatgagtgaactcccattcacaattgcttcaaagagaataaaacacctaggaatccaacttacaagcgacatgaaggacttcttcaaggagaactgcaaaccactgctcaatgaaataaaagaggatacaaacaaatggaagaacattccatgctcatgggtaggaagaatcaatatcgtgaaaatggccatattgcccaaggtaatttaaagattcaatgccatccccatcaagctacccatgactttcttcacagaattggaaaaaactactttaaagttcatatggaaccaaaaaagagcctgcatcaccaagtcaaacctaagccaaaagaacaaagctggaggcatcacgctacctgacttcaaactatactacaaggctacagtaaccaaaacagcatggtactggtaccaaaacagagatatagatcaatggaacagaacagagccctcagaaataacgccgcatatctacaactatctgatctttgacaaacctgagaaaaacaagcaatggggaaaggattccctatttaataaacggttctgggaaaactggctagccatatttagaaagctgaaactggatcccttccttacaccttatacaaaaattaattcaagatggattaaagacttacatgttagacctaaaaccataaaaaccctagaagaaaacctaggcattaccattcaggacacaggcatgggcaaggacttcacgtctaaaacaccaaaagcaatggcaacaaaagccaaaattgataaatgggatctaattaaactaaagagcttctgcacagcaaaagaaactaccatcagagtgaacaggcaacctagaaaatgggagaaaattttcgcaacctactcatctgacaaatggctaatatccagaatctacaatgaactcaaacaaatttacaagaaaaaaacaaataaccccatcaaaaagtgggcgaaggacatgaacagacacttctcaaaagaagacatttatgcagccaaaaaacacatgaaaaaatgctcaccatcactggccatcagagaaacgcaaatcaaaaccacaatgagataccatctcacaccaggtagaatggcaatcattcaaaagtcaggaaacaacaggtgctggagaggatgtggagaaataggaacacttttacactgttggtgggactgtaaactagttcaaccattgtggaagtcagtgtggcgattcctcagggatctagaactagaaataccatttgacccagccatcccattactgggtatatacccaaaggactataaatcatgctgctataaagacacatgcacatgtatgtttattgcggcattattcacaatagcaaagacttggaaccaacccaaatgtccaacaacgatagactggattaagaaaatgtggcacatatgcaccatggaatactatgcggccataaaaaatgatgagttcatgtcctttgtagggacatggatgaaattggaaatcatcattctcagtaaactattgcaagaacaaaaaaccaaacaccgcatattctcactcataggtgggaattgaacaatgagatcacatggacacaggaaggggaacatcacactctggggactgctgtggggtggggggaggggggagggatagcattgggagatatacttaatgctagatgacgagttagtgggtgcagcacaccagcatggcacatgtatacgtatgtaactaacctgcacaatgtgcacatgtaccctaaaacttaaagtataataataaaaaaaataaaaaaataaatctttacaacattcctatgagtttagcatttaccaactgcattttagatatgagagaaaatgctaatagttattattcatagtaataccaacaaaaataatagctaacatatgagtatttgctaagttttaggtaccattatgtatgttacataaatatgcatgtatgcatatatacaggttgagcatccccatccaaaaacctaaaattcaagatgctctgaaatccaaaatgctccaaagtctaaaactttttggtcactgacatgagatagtgactcctttgctgatggttcagtgtacacaaactttgtttcatgcacaaaattatttaaaatattgtgtaaaattaccttcaggctatgtgcacatggtatacataaaacataagtaaatttcatgtttatggctgggcatggtagctcacacctgtattctcagccctttgggtggccaaggcaggagaatcatttgagaagaggagttcaagaccagcctgggcaacatagagatatcctgtctctacaaaaattttaaaaattagctggacatggtggtgcacacctgtagacctgcacacctgtagatcgctggagcccaaacgttcaaggttacagtgacctatggtcatgccactgcactccagcctgggcaacacagactctgtttctaatacatatattagagactatctatctatctatctatctatctatctatctatctatctattttgatcccatgggggagatcactcctttaataatgcaagagagtgaataagatgggggagggtggcgtgcaattgagagatgagctttatactggaataccaagtttatggtgtggaactctggggtattacactgaaatgttaggggttctcagtgggttatttgtctctttctattaaactccatttacatttagctctgctgatgttgctcttgcagcaattggttttctcaattaacagaaaagggagagggaacagcttaaagccttggctgttgccgctcagcaagggaactgtgctgctctggagagaaaggtctggacattgtgagtttctgtttatttactttgtttctgacacacctgtctttcaggaagcctggcagtcctaagctgaatgaatagcatgctggaaagcccttcttttgaactaagttcagggcttttcttctaaactgaggtgccctcacaacacatgttctgccaaccacccgaaggtcaaaaagattttctggatgtttttgagacaaagggaattcaaaatctgcaaggaatggcctggggcatgataattctgagagacaagattctccaggctatgcacagaaaaccaactttttatgttagtatttaactcaagtagaatcaacaatggcatggaaattcgttttattttgcttttcctaaggaggatcatctcgtttaaagtgtgaattcaaaaactcactattgtgatagagtgacctcttttcatcctaattattttccataagtatcctgcttgctagtgaaaagactgaaagtgaagaatactagttataaatcatctttagagtgagagctgaagtgagataatttaacctgaacagcacaagctgtccctgacatctgcaacttcactcatcaccagcagtgaatctgctggtctgattggccaggtgtacatgtctcctctcccgaacggtcaggggtagccagtcacacttctgccaataaagagcacgacaagtccctactctacagttagtgaccatgttaaacctatcaaagattaaaggggaaatggggtattccattcaaatgttaaaaaattccaatccaagatgtctacctattatcatgataatcaacacaggacatttatatccagaaatttggttgctttggttccttttatatttacaaaataattattaaactaacccacacaccccaaattgtatgcacagggcttagaacaagttgcaggagtcttttgtgccaccctcttcataaggctctcaaactatttttttttaaattccatatttctaactgactttctattatgaatgatgaagatttcacactctttcaccatttcacctctctacttccctctttctatcctcccattacagttatataacaattattggctaaataaacattcagtgttctattgtatcatccctgcaaagtaacgtttactgataaaccaaatgatgtgccataattatgttttatttatggaacaactttttgttttttctggagttatatattaccttctttatttgattatgtgacattatcaccaatttttctagacgtctccaaaacataattttttaaattttaaatttctgttggtacataataggtaggtaggtagacagacagacagacagacagacagacagacagatagatagatagattgattgatttatggggcccacgagatattttcatacaggcaagcaatgcataataatatcagggtaaacagggaatctattactgcaaacatttaccctttaagttacaaacaattcaattatattctcttagttattttgagatgtatgataaactactgttgactgtagtcaccctgttgagctatcaaataccagatcttatttgttctatctaattatatttttgtacccattaaacatccccacttcttacttcctcccatccactacacctcctagcctctggtaaccatcactctaatctctatctccaggatctcaattcttttaatttccagctcccttaaatagtgagaatacgtgaagatgatctttctgtgcctggataatttcatttaacataacatcctccagttacatccatgttgttgcaaatgacaggatctcatttctttctatggccgaacagtactccattgtgtatatgtaccacattttctttattcattcgtctattgagggaaacttaggttgcttccaaatcttggctactgtgaatagtgctacaataaatatggaagtgcagatatattgatttcctttcttttgggtgtatacctacctagaagtgggattgctggatcatatgggagttctatttttagctttttcgaggaacctccaaattgttctccgtagtggttgtactaatttacattcccaccaaaagtgtaggagtgttctcttttctctacatccttgtcagcatttgttactgcctgtcttttggataaaagccattttaactggggtgagataatatttaactgcagttttgatttgcatttccctgatgaccaatgacattgcacaccttttcatatgactgtttgccatttgtatgtcttcttttcagaaatgtctattcaggtgttttgcccatttttaattggattatcagattttttttcctacggagttgagctcctaatatattctggatattaatcccttgtcagatggatagtttgctaatattttctcccattctgtgggttgtctcctcaccttgttgactgtttcctttgctacgcaggtatttttaacttgatgtgatcccatttgtctattttcgctttggttgcttgtgcttgtggggtattactcaaaaaatctttgctcaggccaggcgcagtggctcacacctgcaatccatgcactttgggaggcctaggcaggtatatcacttgaggtcaggagttggagaccaacctggccaacatggcaaaaccctgtctcaactaaaaatacaaaaattagcccagcatggtggtgtgcacctatagtcccagctactcaggaggctgaggcacaagaatcacttgaacccaggaggcagaggctgctgtgagctgagatcacaccactgcacttcagcctccagtctgggcaacagagtgagactctgtctaaaaaaaaaaaaaaaaatctttgctcaggccaatgtcctggagagtttccccaatgttttctttcaatagttttatagtttgaagtcttagatttaagtctttattccattttgatttgatttttgtatacggcaagagatagaagtctagtttcattcttctgcatatagatatccagttttcccagaaccatttattgaagagactgtcctttctcaatgtatgttcttggcacctttgtcaaaaatgagttcactgtacatgtatgaatttgttcctgggttttcatgccagaaccatcctgttttggttactatagctctgtagtgttatttgaagtcaggtaatatgattcctccagttttgttctttttgctcagtatagctttgagtattctgggtcttttgtggttatacatgaattttaagatatttttctatatctgtgaagaatgtcattggtattttgatagagattgcattgaatctgaagattgctttgggtactatgtacattttaacaatattgattcttccaatccatgaacatgaaatatctttccattttttgtgttctctttaatttctttcatccgtgttttatagttttcattgtagaactctttcacttctttcagtaagttaattcctaggtattttatttgtagctattataaatgggattacattcttgatttctttttcagattgttcaccattggcatatagaaatgctactgatttttatatgttgaatttgtgtcttgcaactttattgaatctgtttaccagttctagtagtgttttggtgaagtctttaggtttttccaaatataaaataatatcatctgcaaacaagaataacttgacttcttcctttccaatttgaatatcctttcattctcctgtctgattgctcaaggggtaatggacatccctgtcatgttacagatcttggaggaaaaactttcaatttttccccattcgatatgatactagctgtgggtctgtcatatatggctttccttgtgttcaggtatgttccttctatcctcagttttttgagtttttatcatgaagggatgttgaattttatcaaatgctttcccagcataaattgaaatgatcatatgtttttgtccttcattgatatgatgtatcacactgactgatttacattatgttgaaccatccttgcttccttgggaaaaatcccacttggtcacgatgactaatctttttaatgtgttgctgaatttggcttgctagtattttgttgaggatttctgcataaatgttcattgggagtattggcctgtagttttctgtttgcaatgtgcctttggtctgtttcggtatgagggtaatactggccttgtgcaataagtgtggaagtactccctcctcctctatttttcagaatagtttgagtaggattgatattacttctttaaatgtttggcaaaattaagcagtaaagccatcagatcctgggcttttctttactgggagacttttcattatggcttcaatcttgatggtattggtctgttcaggttttggatttcgtcatggttaaatcttggtaggttgtatttgtctaggaatttatcatttttttaggttttccaatttatttgcatatagttgctcctagtagcatctaatgatcctttgaatttctgtggtattgcttgtaacgtctcccttatctttccttatctttccttccccccccccccccccatagagtcttgctctgtcatccaggctggagtgcagtggcacaatcttggctcactgcaacctccgcctcccaggttcaagcaattctcctgcctcagccttctgagtagctgggattacaggcacgtgccaccacgctggctaattcttgtatttttagtagagatgggatttcaccgtattggtcaggctggtctcaaactcctgacctcatgatctgcctgccttggcctcccaaagtgctgggattacaggtgtgagccattgtgcccagcaacatctcccttttcatctctgattttatttattagcatcttctttcattgttttaaattctaactctcttttgttcttacttgataattttgtatagtatccttttgtttcattaatgtgataacttgtcatctgtctagggctacgaagtttattttttctgaaacgtctatttgtttcttaaactctttttatatcaacctaatcatcatcattattttcatttgtttgcattaggctttttgttgaagaatttcctcagagttttgtggagacttggctatctattcatattcaacagggagacactaaaatactgactgggagccttgaatgatttaactggacttgtagagtcttggggttcattatagggtggtgttccttgaatgtcccctccaattctcatgttgagatgtaatcctcagtgttggaggtggggcctggtgggaggtgtctgagtcatgggagtggttcccttatagctttgtgagcaagttctcataaaatctctttgtttaaaggtgtgtaacaccttccttcccgctctctctcttgctccccctattgccacgtgagatagctgctctctcttcagcttccaccatgattgaaagctccctgaggcctctccagaagcttagcaaatgctggcattatgcttgtacagcctgcagaactgcaagccagttaattttctatttcttcataaattacccagtctcagatatttctttattgcaatgccacaacagcctaatatagaagactggtaccaaggagtggggcattgctataaagatacctgaaaatgtcaaaatgacattggaactgggtaagagacagaggttggaagaattgggagggctcaggagaaggcagggagatgaggaaaagtttgaaacttggtagagactgattaaatggtcatgaccaaaatgctgatagtgatctgcaaagtaaagtccgtgctgacaaagtattaggtgtaagtgaggaacttattgagaactggagcaaaggtcacccatgttataccttagcaaagaacttggctacattatattcatgcccagggacctgtgaaagtttgaacttaagagttaatgacttagggtatctggcagaagacatttctaagcactgaagcaattgagatgtgacctggctgcttctaataacctatgctcagatgcagaagcaaagaaataacctaaacttggaatttttacttaaaagggaagcagagcttacaagtgtggaaaatttgcaacctagctatgtgatagaaaataaaaggccatttttggggaggaattcaagcaggctgcaagcaatcatttgctagggaaatttgcataactaaaagagaacaagtgctaatagccaaaataatgggaaaaaggcctttacagcatttcagagatcttctaggcagctcctcccaccacagtcccagtggtacaggaggactaaatggtttaggggataagcacagggcaccactacactgtctacctcaggaggctgctccttgcatcatggtccatccagtccagccgtggctcaaagagcctcaggtatggctcaggttgccactctggagcatgtaagctgtaagcctttgtggcttccttgtggtattaagccttcagatagaaagaatggaaagagtgatcctagtctctgcctagatttcagaggatgtatcagaaagcctgggtgtccaggcagaagcatgctacagggacagagtcctcacagaaaacctctactaaggtagtgcagaagggaatatgggattgaagccctgcccacaaagaatcccccctggggcattgcctagtggaactgtgggaaggaagccattgttctgtgggtcccagaatgtagatccactggcagcttgcatcctatacctgggaaagccgtaggcactcaactccaacccatgagagcagtcatggaggcttcaccttgcaaaagctgtagaggcagagctgcccaaggccttggagtctacccttacatcagtgtgacctggatgtgggacatggagtcaaaggagattattttagaactttaagatttaatgactgtcctgttgtgtttcagacttgggtggggcctgaagtcatttcttttggctgatttcttccttttagaatggaaatgttggccaggcatgatggctcatgcctgtaatcccagcactttgggcggctgagacaggtgaatcacctgaggtcaggagttcaagacaagcctggccaatgtgatgaaaatccccatctctacaaaaatacaaaaattagctgggcatgacagcgggtgcctgtaatcccagctactcaggaggctgagacaggagaatcgcttgaacccaggaggcagaggttgcagtgagccaagattgcaccattgcactccagcctgggtgactaagcgagactccatttcaaaaaaaaaaaaaaagaatgggaatgtttacccaatgcctgtacctctattgtaccttggcttggaagtaaataacttgttttaattttacaggctcataagtgggaggaactcatttccagacaagattttgtatttggacttgggacttttgagttaatgctggaatgagttatgactctgggagactgttgagaagagatgattccattttgccatgtaagaaggacatgagatttagggggccaagggcggaatgatacagtttgggtgtcccctccaaatctcatattgggatgtaatccccagtgttggagatgggccctggtgcgtggtgtctgggtcatgtgggcagatcccttatggcttggtgagtgagtgaatgagctctctgagatctagttgtttaaaagtgtgtgctaactcccacaacccccttactcctgctctcaccatttgagacacctactccccttttgtcttctgaaacaactacaagttccctgaggcctccccagaagctgagcagatgccagcaccatgcttgtacatcctgcagaactgtgaaccaattaaacatgttttccttataaagtacccagtctctcaggtatttctttatagcaacgcaataatggcctaatacatggggtaattgaggaataaagacccttggcttctttattgggcaaccatctaatgccagtactataggtcttttctctgggtggtaattccatttttctgaagaagaattcttcttggttatttttatttttaattttaattcttatgagtacatagtaagtatatgaatttatgggtcacatgaaatattttaatacaggcatacagtgtgtaataatcacatcaggataaatggaggagccatcatctcaagcatttatcatttctttgtgttacaaacattccaattatattcttttagttgcttttaaatatgcaataaattattgttgactgtagtcaccctcttatgctatcaaatactagatcttattcttcctccccactacccttcccactctttgataaatggcatcctactctctatctccacgagttcaagtgttttgtttgtttgtttgttttgtttttttcttgagacagtctcactccatcacccaggctggagtgcagtggcacgatctcatcacaacctctgcctcccaggttcaagtgattcttgtgcctcagcttcccatgtagctgagattacaggcatgcaccaccatgactggctaatttttatatttttagtagagatggggtttcattatgttggccatactggtcttgaactcctggcctcaagcaatctgcctgcctcagcctcccaaagtgctaggattgcaggcgtgagcccctgaacctggcaagttcaagtatttttattttagttaccaaaaattagtgaggacatatgcagtttatctttctgtacctggcttatttaacataatgtcttccagttccaactatgctgttgcaaattacacaatctcattctttttttatggctgaatagtactccattgtttataggtactgcatgtttttttgcatccatttgtctgtcgatgggacacttaggttgcttccaaatcttagctattgtgaatagtgctacaataaacatgggagtgcagatatttttttagacaatttttatagaaaaacaatttttctatctcctctcttggcattataaggctaactgacagagttcttattcccaggtgctactagagaagtcagaacttcactattcagttgatagactttcatttactctctcaccttccaatgtgcctagtatccccaggttaagacttctcttatttatttttatagcataaatttccattctaatgaggataaagtggcactggtctcctagctgagcagggtgagaggagaacctatggaggactccccttcatatgcagatttctcatccaccttcccccctttttaagattcttggttcctcaattgccatctttcaagattttgacaaagggaatggtttgctggttttgccctcctctgtgggcactttgtaattagcattctcaactttgttgattttttcctctcctttccatttcctaaattggtcctctcacatctctagttgtttcttctcgtcaccctttattactgacactttattgtcttctattctttaccgtcatttgacaagagggctttcaaaggtagcaaataaaaaagactgtattaattttccagggcttccataacaaaataccacagattgggtggcttacacgacagtaatacgttttgtcagtgttctacagtttggaagtccaagatcaaaggcgtcaacaggtttagtttctctgagacctgtctccttggctttcagatggctgccttcttaccatgtgtttacatggttgtctctgtgtgcatgtgtctaatgtctctttgtgagtccaaattccctccctttataaaggtatcattcagattggattaggggccactctaaagacctcattttaatttaatcacctctttaaagaccttatctccatggttacattctgaggtaccaggggttaggacttcaacattttgagaggacacaattcagcccataaaaaagatcacatttaaaacattttaaaaaattcttaacactacgccaaatgtattgcaagtattctctatccttttacttaatgacgctgggaccatctatctaaatgaacactgctctctgaaatagcactcttttcattaatggattcgctcacttattaaatatcaattatcgtgcatctatttttgcaaggttcttggtttatcagcacaacaggatacagaggtaagccagactcaatatctatatacaagagggctttgttgagaaggataagaacaggaggctttttatttctgtgatgaacttttataggatactttaaagcataaaatatttgtcaactccttaatggtggttattctgaaaagaacttgaatgttttcaagggttgtactaatgcagtcatcttttacattaaatgcaacgttttgtacttttattttttttaagtcacttctgttacccagaagtcaggcacttataaaggctacttctgttactttctcttgtcaccatttcatttcaggaaatctaacagctcaactttcaattgcagaagagaaagtgaagaattgaacaacataaaaagcatactcccctctgcggtagttacacatccacaattacgctctgcttagggcaagttgggagcactggagtgggggaagaactgattatagaggggagctgagggtctgtagctcatggcacggctcccaacaatctggcccatggctgttcttacttggcaagcacatgaaattgaagatcactgctgcatctcatgcttctacagggtattgatccatggaaaatattaatgattaacttaagcaatacaatgagaggttgttactttgtactggcaatctttgacttgatcccctatacaaatcacatgcagaatgagtataaagcaaaaagaaaatgattgtttcatttactggtaagttattctggtccttcaccaaaatatgggaaactattttggtctaacatgagactactcaatgagaagtcataactgatatccctgaattttttataggtataaggttaagcttaagatgataatttatccgaagtcttctgaactctgtttttcttaggcagttttctgtatcttggcattgctggtactatattatggtagatatgaaatcagccaaatttaaacttgtctatcttttgttagaaagcatttggaggaaaattatctacattttaggattttccagttataacactgttgcctgtggcaattgcacttgctattagactcttcctgccctttttcaggaaaaagaaactcaagtgtcatttgttattcttgataccaatgctgagtgacctaacaaaaaatgccatggttggctgggcgcggtggctcacgcctgtaatcccagcactttgggaggccaaggtgggcggatcacgaggtcaggagatcgagaccatcctggctaacacggtgaaaccccgtctctactaaaaatacaaaaaaattagccgggcgtagtggtgggggcctgtagtcccagctactcaggaagctgaggcaggagaatggcgtgaacccgggaggcagagcttgcagtgagccgagatcgcgccactacactccagcctgggtgactgagtgagactccatctcaaaaaaaaaaaaaaaaaaaaaaaagaaatgccatggttgtcttgttgcaggtattctgtatttgcctaccatactatgcagtgtccttcttacaaccacctaacctttctccctcccacaatccctgaacctgggtacaattgcatgtagataaagattgacagatggttagcacatatattgatctaggcagataatctcacagatgtgatatgcgggaaataataacatcaaacagctttggaaaagatgtgtaaacactgtgaattttttgcttctatcactttaagagttggactgatttgggaaggactcaaactcttcaagtctagagtcttcatagataaaatagggacattttcaacttcctcctagaatgatgctttcttgtggggactgaatgaatcaatacacatgaaagtgcctctctcccttgatatctacaaatacatgtgcacacacacaaatatacacatacacacacacatatatatatctgtgcatatctgctcagaattctattatgcatttgtttcagtccagacacttgcagtctagtttagaaatcaagcatgaattgtatagcaatccaaatgacaacaaaatcttacaatgaaagacattttagaagctacatgattacatatcctatgactgtactgaaagtaacagagttcacgtgctccatctgaaccctcactgaatgccagtgcacacgttattcttaatactcaagatagttctgcaccttatgttttgttactgtgatttcaaagatatggaatgtgaacctcagagagggtaggcaacttggcggaaaacagaagaaacagatccacttggaccccaagcctggcctccttccatcaggccacccaatcctgaatttgaaacacagtgaattgcatcatgctccgcagtcttcatcatggaagagggagggactggaccttgaagaaagggtagaatttgggcagatcaagaagaatgcagggacacttcagaagaggagaggatgcgagccaaggcatggagacacaaacattggggacatatttgtgagacagtaatacaccagtttgtctataccagaggatctgtgtggatgaaaagcaagagaaggagccagaagagtcaagtggagctaattctgaaggcctggaatgccagacaaaggaatgtcattcactagctcatacagaaaatgagaaactgtcaagaaaccactgtgctctgttacagagatatcaagatatcgaacaaacaacaaaacaaaacaaaaataacaacaacaaaatagtctgtgtagggcttagagcccatgtactcctatatgtggactaggactctggggctatggcagaagtctgtgtggagggccatgacagcacaaggaagggagttgtcatttggatctggcatggaagttgtcaaaaaaggtttcacagaggacatggatttatgctggaagtgacgggcagtgaagaaatagtttgaactgtggagagtatgataaagataccattttcagaaaatgaactcagtagcagcatccagagggcataatgtggagtgatggctagagtctggagactgaggctaattaaataggagatcattgcagctatccatgcaaaaggagagggtagtggcagtggaaatgaagtcacaggaaagcatgagattttacagtgtacatctcagaggacttgaccttctggcagataaagctgatgagggagaggaggattcagtgatcactctaaggttctgagtttaagtggaaaaatagcaatgtcctgaagaaaaatacgggattttcttcaggagagcttcttcaaggaaaaaggtgtgctcaggtgaggaaactgaagcataaaaagagaaaaaacttgcccaggttggcaacaacttgccaatacagtcagtgagtggcagactctgagttcaaacccagataatctaaatatgaactgtctaatacggcagccaatggccacaagaggctgttgggcacttgaaagggggttagtatgactaaaggactaaatttttagtcttacttaatatttatgaattaaaagactgatagttgatttaataatactatatttggaacaacttgggaagtgaatctatatttctaattgtaaatcttatgagatctaaatgtccaataaagatccagtataattgaggacaattgggcatccaaattaatatgtgatgtaagtaaaaaatacatacaggatttcaaagacaaagtatgaggaaagaatgttaaatatctcattaataattatatatattgtttacaagttaaaataatctgatacagtgagttaaataaaatatatccttgaaataaattttacctatttctttttaccttttaaatgtggtaccagaagacctaaaattacgaagtgtctcataatatttctatactccagcgttggtctatatcctgagaaatacataaatgagaggtcacctgcatgagatgagtgacgtagttaatgggataggctattcctttcctaactctaaatctctattttcggaagatgactgaggagaatgccaacattgtcttaattcagtggcacagtgggccctgaacatgatcacattgttaatctccctactctcttgtccgggtcaacaatttcacagttgtcagaaaatgaacaactcaaattcccctttcttggtatatcttacatttttttatgtctcaaaggagaattatttcattcacatctgtttctgtctttcaatgaccagctctatcttcacgtcagtctcaatctaaagccaattttatcagagaatcccagagacaagcccaaagaggacttcttggatctggcctgagaaaatagtaaccagaaaaccaggggctattcaggatctgggtgtagcctgtatgcctgaatttttttccatgggggttcgttcgtagtctgatagtgaaatccaaatggtgtgtttgagaactgttgacaataatccagatgtttgctctactaagagtcatatgtgtaataaactaaaggtggacaacttcaattgaatggaataaaaggtcagagctaagcacttgtaactctctaggtattgcaggaattcgggtagtatcatttataaagaaaaagaatctaaaattctaccaattttcaggcattcagtgcatatgaagcaatgtgtccccaaagttagatcatccagatgttttatgttaatcagagtaaacatatgattcatcacagattcaacaaagtcaaaggcagaaaattcacatctacttgcaagctaaggggtgtagtgctttttccattttctatgccagctctcttgacatacttagcacttacccatagaataattgaggtcattggatttataataaaatgccattacaagaaatgctaataaaattatatgttctgtacatatagatgtatacatatacatatattttatataattctgtgtgtacatattgcatgtatgtacatacaatacatatatgaagtatttcacccaagagatattcccacttttcgaaatattgtgtatgaagtcttagtacaacagataaactattctactttactcctttttaatttctaggtattattttaacatattggctgtatatcctttgttaacaattctctataaaagaaaacttaagcaaaaattatctataacttttcatttatacattatatttggtatatatcatattaaaatgtacagaatgctaaagtactatatctattgattatagcaatgaggtgctcacaccgataaggcaaataaaaagtaacatctccagccaagagcattggggaagagataaagaaatccattacaaaggacattaaatgcatttgaaacagcttcaataaaatacccaagctcctgggaaaataatgtatctaaagataaaatggttttcagaactactgaaagggaataacacacaaatatccatgtctagccaaacaaaacaactgtacacctattgaacttccagtaagaaatgtttggttaaaaagaaaaagctgttaccttttttttttttaataaacaaacaacataatgaaaaatgatagagcactcaagctcatggctaactttcactgtgtggccttaaacatacttctttccagtgacagagtactagtactattttttgttggtttcttctctgttctcctctacaattccaaaattatgtagttctatccacagccaacaaatctctaacaattatgccaaactttggctgatttctggcaattgtaccacttaaacattcatatttattgctgaggatgtaatagtagggcagatcagtccatcacaatgtctctagcaaacattcgccgctatctactttattcctagcatggaccattccacgttaggccctaattacctgcactttttgaaaagcaaaaacaacaacaataacaacaaaacgctttacttttcctgataggtttgcatttagccattgcagaaacatagaacttaaaagaatacaaaatttaatattgtaatccatcatcttgtattagttaccaccttattacctgcaaagcaaatgattgctataagtcccctcattagtctccttactctagtcttctggtattccaaggtgtgtcttcattgctgccacttcattctttcataagcaaagctatgatcataggactccctctcttcaaaatctttaatagctcaccttagtttagaaaatattcctttgcttaattttcatgaccctaaaaatatagtctcattctccttttcctgttttatctcctatctacatgattgcctctcaagttcaataaattctgaccacactcaattttttttctataaacgttcatgtattttcctacatccacacctttgtgagattgttctcccagcctgaaatgcccttcatcttcaactctgcataactgaatgcaagctgcaagaccaaatgtcattttatctacaaagcattctctgatactcccagttgaaagtaaattctcccttctcagagctgccaaaatattttactcctgctttctccatggtacttaacagaacacatgggacaatatttagagaacagatgactggtgcctgggtcccaactccaggatttacctaacaattttttttttgtttttttgagacagagtcttactctgtctcccagggtggagtgcagtggcacgatctcagctcactgcagccttcgcctcccaggttcaaccaattctcgtgcctcagacacaagagtagctgggattacaggtgcatgccaccacacttggctaatttttatttttggatttttagtagaggttttaccacgttggccaggctggtctcaaactcctggcctcaaatgatctgcccaccttggcctcccagactgctaggattatgggtgtgagtcactcactgcacctggccacatttaactaactttatggtcttcagtaagacctttgaatctgctgggtctcagttttcttatcagttgatgtgatagtcaaaggaaacaatatatgactatctactttgcaaactgcaaagtgctatgtaatgtgagttcattctctgccagccaccctctttttaggcactgcctttcaggagagtacttcatcctctttcatgaccttatttgtaagataatccctgaatagcccagctggtggtaggtgtttggtctaatgtactcctagaggactattaaagtccttatgtagttataatttatttttccctttgaatttttgtctgagcagttcgactttgatttttttgaaggctaagaatttttctctctcagttttgcattcctagctgaaaattttgaaatcagttcctattcagtaaatgtttgctgcacaagtgaatgtatgagtgaattaaatgaatgaatgaatttactgatatcttaatgttgtggacagttatttatgtttagcacttatcatctgtctttagattttaagctccatgagggcaggttctttgtatgatccatgtttgtatccttatagttacatgtgcattatataaaataaatacttgcagaaagctgaatagaaaaaggtagctgagctggatgacatggtaggaggctcctgtgcatagagtttcctgtacaacagtttttttactgacgtgcatgcaatcttaacatctgtttaattcacaaatgaggctaatatttattattgacattgaaatttcttttcaaattgaataaaagaatgtctgtaaacatagatacatcttttgatggtagagtaacacaaacttcagtggagtcatctcttagattatgtggcaagaatctgacatagtcacttttaccgtggagaaccccttgaatcacccaatgtaaggcaaaatgttcacactcaacagttcaccaaaggaactgagatgggaagagtggtagatccacatctcctacctcaatcacacttactagtgaacatagatccattgcacgtggtggcagatggggcatctggaattgctctattggaatttttatatctcccttgctctatctctcccattttacttagcacgtgtatttgaatttgcatcggtaagtccttggatggtgaaactgtactgaattgctcttttacagtatcaggttctcctcagtcacagtacgtgtaaaatttctcaatagcttagaaagattaatgggtctgtgtaaatctcattatcccttaagtaatttaaccccaatgatccccattgtaacccaaatcctagtctgacttggagaatccagtgtggtaagtaaaaatggcaatttacctttaaaaactgccagtgatgtgcaggttaacactcatcttcctactttattttgagatgactttgaacatatactgaagtcagagacaacagcaaccccagggctggaatgtcctgcttccacaggactcatcatatgggattcccagcatctatcagccttagaattcaagtgggtttttccccagagggaagactttgctgacgaaatgaaacatcagggagaagcaaaatctcttgcaaatcaaaatggccaagaactcccttgctagcagagtatgaatcctaccacaagcaacagaaggagaaaattagattgtgttactcttgatgtcatagccactggattactgcacaagaaaaaaaaaaaaaaaaacaagaaaagaaaatggaaacttgaagagaacaaagagctgctggtattcacagtgttcttgctatatacatgatggattgccatggtaacaccagtatcatatgaatcatcttacatcggataccggcatacattgttcaaaaataacagcacaaaccagagcacatattttcagtcagggtagcagggggcaggagggcgatttaggaaaactgtttacctatcataagggtgagttaaataatttattatcgcacaactgactttgagacctccgtacgcgtatgtgtttgtgtatttctaacttttgcctgaattaaaaatcaatgagtaaatgccgtatgcttcagtaattcctcatagactatgacaaactgaagtttatacattttgtgagctggtttattgtgaattctcatacaatcacaagcttggatttcaagaaatcttaggagaattttgaacgttttcatcatgaaaattaggcaaattcattgttttttgattcaaccattgcttagaaagaaacatcagagcagtagaatttgtatgtttatactcgaggtcaattataaaacacagtacgttttagtgtaatttactagtactgcagaaatgtgaatattgctatagcaatgaaaaccaaccaacaaacacaaagacctttggggtggattatatgaaaaccagcaatgtggagatcacttcagaggctcttacagtagttcacatcagttggcaatattaataaagacagagtggaagggactcatataagaacattataggtaaaagaagacttgatgatgagagacagtgttaagataaaggaagatgactaaggtgactcctgtgtttctagtttagataactctgtagtaatcaatccaacaaagaaatagaagaaaaagaccagatggtaagagtaagatgatgagttcaattttggccatgagaacaactgaaataatttccaagcagttagtaggagtctaaaggggaggagtggtcagagcttgagatgtacatttggaagttgctgaaagaacttttttttaaataaagaactcattgcctgctaatggaatgaatttaatgtttctccaaaagggtacacatatatttactgtctgattacttttgtactctcagttgaaaaaaaatgaattttacaagaatttattgaatatctattatgtaccaggacccagacaaagcaccagacacataatggtttaaaacataggcttcaaccttgtttccatggtcctatgattgaacgtgggaggaagcccttaggccaataaaatacataaatatgtaattgcaattgtgacaactgctcaaaaggagacaagaacccagtaagagtacaaaaataggcacctaacatagtctgagcgtttggagaatatttccctggggatgatgaggcctgaggatgagtaacaacatgctctactgagaaccacatgaatgaagcactgaccatcttttcaaattcaatgcacattccatcttgtctgaggagctgattaccttttccttagacacctgtaacatccttctcatcaaatttcttcccttaggggcccttctctccatcaccactaaactattttccttcctagagcaaccttcttagggcaatatgaaacacaacattatgggccaagtccaaagtcctgactattgtttcaaaggctgttagtagattgttcaccttcttttgcctttgaaaggtgccatcctgagcctggaatgctttgtcagcattcgccacttcatttatcatagtttacaaagtacgataaaaggtgataacagaagctttccgtttgtagttcatccatgtaataattttcttcaacttaagagcaaagccatgaaaaactaaaaagaaagttccaaagaattattaagtaatttaatgtctcttattggatatagaaatgggactatcatataaaggtcatcaagattgtgtagtgtcttgtactttgctgacagtaaacattccaagtactctaacaattctcattccactccttttggcaagcgagaggctgcatggttgggtgatggataaatgctgaactgattgcagaacaaaggtcaacatttatgacagtttttattaaactctagcagttgggaatagatttgaaaactgacctttttcttttttaaatctcagttggaaaatattacctattgtttatttcaatgttttaaaaacctcaatgataaataagacacaaagaatatgtttttaaattgcattgccaatgaataaattaataaataatcacttgtttctctccaaaatgaaataaagaattattgggttaattagcatgtaagaaaacagtagtctcccctactcatcttctccagtttatttttgccactctcctctctgcctcattacacttcagacaccttatccttttagtttaacacatcagggcttcattcatgtggttctcagcagagtatgttgttactcatcctcaggcctcatcatccccagggaagcattctccaaacactcagactatgttaggtacttatttttatactctcactgggtccttgtttccttttgagcagttctcacaattgtaatcacatatttatgtattttgtaattgtaatgaaattgtccctgtcaggatttcacactgcttccttctgttggtgtagggattcattcttttccattccaattaatgcagcattccattgccaaattttttctgaaacaactctttccatcatgccactcttagggaggaggaaagatagaaaatatataaattaagatttattatgatagtgcagtaacagacacagaagaaaagaaaaacagctagttaaggaggcacttccatttggaaatagaaaattatgaaaggtcttctaggaaagatctgtggaatgatgggattcatcacaaaatgaggagagaatggaactctaggcaaaaaataggtatagctagtagttatttatacctaaaatacacagtatacatgggtgacaagggcaatttacaaggatgcagagatgtggaagggaatagatcatgatggctgggaatgtaacctttttttttttttttggtagccactgaaaagctagtggtataagcatggaagcgtcatgatggcattttagaaagtggatctgtggatgacagtcaggaagaggatgttgatagaacagagactagttataaagttagcggttttcaggcaagataacatgagggttggacccaagatggtagcagtggagatggcatcaaagggtgaggtgaaggaggaagagtgtacctgcaactggatagtggtagagtggttaggctgagggagaggaagcacttaggaggacttccaggtctgggccataagaaaaaaggacatgggagatggggaaggtccctgggtaatttttgtttcaaatctattgagtttggcagcactacatagagaagagaatggggaactggagatatacattcaagttaaatctgttactgctaataatttttacccagaagtagggagaattagaacaaattctgaggataatttgaagttttgtttaaagtgaaaggaagggcctctcatcaaagaaagtagtccctttgttttcaaagtttttccttcataaaacgtgttctttgctgtattcgtctgttctcatgctgctatgaaaaatatccaatactgggtaatttatatagaaaggatggttaactgactcacagttccacatggctgggaaggtctctggaaacttacaatcatggtggaaagcaaaggggaagaaaggcatcttcttcacagggcagcaggaaggagaaagagtgccaacaggggaaatgccagatgcttataaaaccatcagatttcagagtactcactcactatcacgagagcagcatggggaaactgcccccatgattcaattacctgctactagggtccctcccacagcatgtggagattaagggaactataattaaagatgagatgtgggtggggacacagccaaaccatatcatttgctattaggatgagctggttatgatgaaaacacacaagtagtcacacattcacaatcgatgggtccatgcatttaggcaagagttcagcagagcttcacataccaggccaacaggatggtcgcttaatatatgtaagtgtatgtgtaattttgcctagtattttcaccactacttgaaaagcatatctcaatgtttattacctagtctggagctacaataatgtatttgatcatttattcagctatctttaatgaaatcttagtagtctccctactgaaagaataataagccctgaaaatgcagtaaagccacactaattcagacaaatcagaagacaggatggtttgaattactgaatgctttatattattttaaaagtgtagcagttgtccatttttaaccaggcaagaaagtgttatcttgtgcttaccacaagaaaggtaaaagaaagtattttcatgaatacctaaaaaatatcaatcatctagatataaataaaggtcttaaaaaagctctgaagttctccctgatttaattgattcacataaggttttttccaccttagcactactgacattctgggtcaaataattttttgttgtgagaggctgtcgtgtgtattataggagatttaacatccctattctttacctacttgaaatcatcagctacttcccacttattacaataaaaaaagtccctagacattgccaaatgtcccctgcatgagaggtggagggtagaattgcgtcagttgaaaatcactacacccctcaataataattttaatacctccactcctcttgataaaagctataaaaaagcaaatgttagtctaggccacgtttgaatgattatagagttcaaaataaggtggttgaatttgataaagatttattgtttgcaatgtgtacttgtttttctttggtacagaaaatgggacgtattcttctccgcaatgcctccctcgtgcaggttcatgcccattattgagtccacttttatgaacatgaagccactaattattcaggattcacagtcggattactatctctctccacaatcattattagtaaatcatttcatgagcacaatttgttatgggctgaattgtgtctaccccaaaatttgtatgctgaagccctaaataccagtatctcagaatgagactatatttggagataggaccactaaagaggagattaaaatttaaataagcctttagggtgggccttaatccagtctgactgatgtccttataaaagcaggaaattttgacacatacagagatcccagcgatgcctgcgcacagaggaaaggccatgagataacacagtgagaaggtggccatctgcaagacaaccagagtcctaaggagaagccagacctgctgacaccttgaccttggatttcacagcttttggaattgtgagaaaacaaatttctgctgtttaagccaccaaatctgtagtattttcttatgaccgtcctaacaaattaatacaccatttgagtaaattaatagcttgatgattggtcataaatctaagtgcatgaccttgtgatcgttccacaagaagagagcaggctggtttaccttcactcacacttactgtattccttcctgtcttctggatcttcgtaccctgctttttttctgatcccagcgataatagggagagcaagcctacctaaaggatttagaaaaacagaggccagagagtataccagaacagctgcatcaccagaaagagggagcacagagcaggcagcaagggaaggaccctcaccagcactcccacaagcacccccctaccaccccaccctgccccgacagtaatggtgtcaagccaccaaaatgcagggaagaaggcggctgggtgaggtaaaacatgacacccggctgtgaaaagtagtgctcaagggcacttgctttccattgccttggggtgccagtggctactgtctcaccacattcactgctactagtttttattttccattttgattaaaaaaaaatgtgacttttacattatagcaagacaacagaactggggcttatatgtcataatttttataactgattttatgaaattttgtgcttctatcaaatttcttacattttcttacagttgcagtattgtttccctctaggaaattcccctctgccacctcccacagtgactttttctcctcctttctacaacttgaagctatacacacacacacacacacacacacacacacacacacacacacacacacacattacatatatacaaatatatacttttatgaatacagaagtgaattatttcaggttctcctttgctgacctggtaatgacaaaatgcatgatccccaaccacttaagccagtaatctaaagtcagtgctacatgcagtttctacagggaaacaaggaaagggaatttaattgatccaaatgaataacagaagcaaaaatcttgccaaagactccatactgtggcatacagggaagtgattttatacacacacacacacacacacacacacacacacacacacacacacacgcccctatgccaaaatatgtaccatgcattttctaatcatttatttattaaacaaacatttattatttaacctgttctgggctctatgctggacactggggaagtaacaacaaccaagacgtgatccacacactcaaaaactttacagtccaattgggtgaggatgggttagaagagccagattaaatctgatttttaaatctctgtatgaagggccaggcttgattgctcatgcctgtaatcccagcactttgggaggccaaggcaggagggtcatttgaggccaactgtttgagaagagcctgggcaacacagcaagacccagtctctctaaaaacaaacaaaaaaattagcctggcacagtgacctcaactacttggtaagctgaagtggatcatttgagcccaggagttctaggctgccctgatctatgattgctactgcactccagtctggccaacagacacagaccctgtctcaaaaaaaaaaaaaaaaaagaaattgctatactaaaattgagacataaaagcttcataaaattgaaagaaaattatatttcttacaaaagaaaaagtgggacagtacaatttacagaggctaccaaaaattaaaaggaaaacatttttaaatcgcaaatatagaaagtaattataatcacagatggtagggttgtcattctcgtcaacattgagtttacttaagatttagtatgttaactgctttcttgatgtcttcattgctgctcttgaaataaaaattgagaccaattaaatgatcatgtggtcatgtgtctaatctaggtgattttctaataatttgggaattatttccctgttttccaagaaaaacatgctgttctttcaagaagtcattattttataaggatatacttagctttaaatcgagctatgttttgcacttatgcatttgatttcctacttcattttctctatggattttcgtgaaaagccaattttttttatcttttattttttgtcccgcaatctctgcttctttgggtaggctgaaatatcaactcatagctactcttctttagatgtctttccctccctcccttccatccttccttcctcagatttttttaagtaattagaaaacaattttctttctgccaaaaaccacaaccgagatgatatgaaaataaacataaacatgctactttagataaatcttagtcccagcaagcattctgaaaaagaaccattcaaaacttaggtagattttagtgaatctaagatgatgactcaccattccaagtgtattgttttctcaacagattcaaaagaagttgaggttttaaaatttacaacttaagaaaatgagtaacagaataaaaagacaacctctatgatttggatgttcttccattcattcatccacccctctaactattgttttcattacatgtttgttgtcatatttatcctttcgtagaatgaaagctccagatgtaataagttaactttttatataaaatttatttaattgatttactagccataggtaagtaatgtattctactgaaagaaaagatggatctggtatttttacaaatcccaagacctatacaattaaatactaattattgtaaaatgcctttcaaatatattttcttgtaaaatacactgtgatgcccaattttaagcctaaataggtatatgtctgaaattttctgggtctatgcatatacacaatatacataaaaacataatttgactgacttgtacaaaaagttgattactttaaagcagaaaaattaaggtaatatgaacagggacattagatattcatgtggattttgcaacttgtatggatttgtagtatcgtcccaccaactaaagaagggaatgaggtaactgacagcaactgagccatgttgggtgtcttaggacacacttttctgaatgtattttaaaatagttgcttggtgctgctagccggtcataaagtcaaatagtgatagagctggacagaaaagccttgatactctggagaaaagaataaaatattgtctcacaaaaatcagaaagctttctgaaggtttagaaactttttaatcacttaaacatcccttcatgtttataataaggtgaaatctggcaaaatgcatgctttgtgagtttgtgtagatataattagaaaaagaaaagtagaagagtaagatagtaatgacagtttccaagtaaaatacattgcttttagaattttggattttcattatgtggattcataaaattagggagaaatggaattttcacagagagaatggaacatctttataaatgcttctgaagttcattgttaattgctgaagaaaatgacgttgtataaaaccaaaattgaggggtgacttttggacatattagttaactatatcatcgctattctgatactacataaaaagggtgggtcgggggtagaacacagatctaaaatgacaacttttttataggaaaaatacataaccttgttcttccctccctagcaactacaggaaaacaaatgtttttgtagaattataactcatttattgcattaatgtgttatgatgcattaaggaatgtcacatgtagattatgagttactgggcatctggtataaacagccatatagccatcaataaatatatccattatttggctaaatcctctttcaaattctcatcatgggtgattttgatggcaatacaagcactgacaatctctcaaattcttaaaatctacagaccttgaaaccagatcagcttttgctaaatagctaaactatttccagctttcctctctggttaatttttttcccaactatccagtgtgttgaataaaaactaacttctcaccctgaccctcccatttcagcagacatccaaagcagttaccaaagggcaacaaaacacattttcactgacaaacaactagaggaaaggaaagcagttaccgtctcctctgtggcttaatatcaattggcatgttgatcgcgtatggtgatccatgaacataagcgcttcggaatctagccaccttccccagagtcaggtactcacagctgcttggcaaactcattatatccaaaaggcaagaagtaaaagcaaatctgagtagtcagaccagcattcctgggaaggctggaaagaacatgtcagataatagatttcagacatatgctgctcactggttgcccggtgcttctttgcttcaaaagtaaacgcgtgtttctcggaggctaaatgtactaccttgttttctgttcattctgttcatggatacaagaagctttttgcttatttctaaccaggctcatgctctgaccaattattggctgagtagataaagcagaaattctgtagctccacaaaagcctatttccactcagaccaaatctctgagtaggcagcaaggttttatccatttttgtctaacgttgaaaagaacatcaacctaatgtaatagtagtttggtaatcagagttatttacctgtaaacaaagcatgcatatctgataggaaggaaataattatttgctatattttcgaagagggaatattgttcactaaactgttatagatacttagaaaatgagatgggtatatggaaatgttatgggcggttttccaattctctggtaaaaaaattgtgggttcttattcataaattactattcatgatagaactgaacttagcctctcaggaacataaaaacggtaagcaatgtctttattcactaaaacgttgatgatgatacacattttttttcctcgtttaaaacactctttgagaaatgcaccttctacctgcactttgaacgaagatctatggaatcattgatagtgaatgttactaattctttgtaagctgttttttcataacagtgaaaaataagttggagaaattagaaaggatattaaataattctactgaaggcagcagggtcttagagaaatgctgtatctttatcccacagtttttctagcctttatgccatttgctagagttatagcaacaaaaccacaagtgttcagggtaatgagagtagcaggtgttcagagtattctgtgagataatttttattttgaaaaattatttcttatccaggatttgaatagacacgccagtttatttaagcatcctgggacctgggtaaacatacagtgtgctgaaaaagggctacattttattcttcagtagccaaattcagacactgtttgggtttaaacagcagacactgttaaaatccagaaattttaagtttgaaagagtagataattttccttttttttaaatcttgtattttaggtttgggggtagatgtgaaggtttgttacataggtaaacttgtgccatgggggtttgttgtacagattatttcatcatccagatattaaacccagtacccaatagttaccttttctgcttctctccctcctcccaccttcaccctcaagtagaccccagggtctgtgtccttccttgtgttcatgagttctcatcatttatctcccacttgtaagtgagatcatgtggcatttggttttctgttcttgtgttagtttgctaaggataatagcctccagttccatccatgtccctgcaaaagacacgctctcattcttttttatggctgcatagtatttaccatttctattcaataattttctttcttatattttaggtttcaattacaaaattatacatgctatttttttaacatgccaaatgacacagaaatgtgaagataaaaaagattgctgtcttttcccttccttggtaggattaatgggagggaaaagacagcaaactttttatttatacaaatataaatataccacacacaatacacaaaccctcacacatgtatagggattctccttcctttttgaataaagtgggctcatactatgtataatcctttattaatattaagtcaatcatgaaaaaattatttttgtgaatgcacagagacctagtgagttcttttcaatagttatataagattccatggcataaatgtaccattatttattcaatgagtcctttattgacggacatataattttggactcatataaacaataaacacatttgctaatatattcttactgattggtgcttgtatttctgaaaatggattgctagcttacaaattgtgaacatttttccctttaataggctatggcagttcatattcccacagtcatgttggaagatgtcaactcctccacactcctgccaagactatccattgttattcaagtttatttctttatagtatgaaaataaggtaggcagctctctgaaatatccagtgattgcatacagttccttgatgaaataaaactactattaaggtgtcgcaaaagtaagaacagcctttctgaactgaaatatatattgggacataaataaacagcttagaaaggctttgcacaggtgtacaaaaggcagaagtctggagtctcatcagaatgagagaacactcaatgcaaagttagtaaatagtaaataatttttattaatttgcataattatgaagagaataaatatagcaaaaattctgttatgtttttactcttcagtatatttttcttaatgggaataatatttcataatttgggagaaacatcactaattttacaatatggatgtaatgcctaatgactgccaactaattgtgatgtatgactggggtgtaatttgtagattttgcataaagaggctctttggacatactccttcatttgagagtctgaagaacaaaagctcaatgaagcattttcacatgccagctaatttaggagattgcccagtagaagagaataagatttgcttcacataagaatttcctaggaggggtaacaatcagaaattgaagaataagatataaacctctatggtagagacctatgtgtcctatgatgggtaaaattccagagttttcttagcaggggcatttttgcttgtacccaggtaattatttaccaaaagcctggcaggggctcctggggattacctgtacttaaatttggatgagagaggattactgttaaactccagcctgccaagaattcagagtctgtgagaactctggccaactagcaggaggtggcccttaagggaagaaaatggaatctttctatcgtcaacaattccctttctctggggctggagagaggtagttggggacttgatctttaggaaaataagaacacattggagagtttaatttcatctaaagattagagctaccatccataccaggcctacctccaaataaggctcaaatcttattaaggaatggccatgattacccatctatgttttgtttgtttttgcatactgggatttctatggaagacaggtatagagtctagcaaaaatctcacttatcatccccatgattctatgctcttgagaacattaaaagaaaaggagaactcacatgaaagcatctggaacatcaattttcatcactatgctagacgttgcaacgttaataatgccctgcacagcaattaaaagtaattgccagcaagcagcaatttcaatccataggacttttcttctaataactggaataatacatattaattaaggttctttcagcctttaactctaccctggcctacgtttagcaattttaaatgctggaggaacttctttaggatgttcctaaagaagtctcatctttaggatgttcctaaagaagtctcatctttaggatgttcctaaagaagtctcatctttaggatgttcctaaagaagtctcatctttaggatgttcctaaagaagtctcatctttaggatgttcctaaagaagtctcatctttaggatgttcctaaagaagtctcatctttaggatgttcctaaagaagtctcatctttaggatgttcctaaagaagtctcatctttaggatgttcctaaagaagtctcatctttaggatgttcctaaagaagtctcatctttaggatgaggttatcatctgttaatgaccacatcagagcataagaattgactgaacgatttcccctggcttatggcttggaagactccttccctccccaaccctcgtgttttctgctcatacctggactggagacccacaaaaattggggtttgcatctgctctcaattcttggagttgttcttgattttgatctctacacttactggtcaatgcatccaatgaattggctttaaatattctttatgtgctgaaaaactcccacctctttattcagagttcacatttttctgctgttaccatcagctgcacatgagaaaattccacttgtaagttccatagctagttcatttgagcatttataatgtaattcaaatcaactgtgttcctcccctcctccactccctctccccacatttcttcttatattccctagtactggccaccattcagccaataaccagacaataactgctaatcaggtcacaaaccctagagacatgaatactattgatagtaacaataatattaatagtcaatagataatagctaacactgatcagatgcattcaatgtgctaggcactgtggttggcaggttgactaattctcataaaatatgagttgggccctattattatactcatttttcagatgagaaaaacaagacactgagggataagatatatacccaaggtcacatagagtgttaagtggtggagtcagagttaggaaccaattcatctgattccagagaccagactatatcttctacctctctacacattctttaatctctctcaattatctttccccctatgttttgcctagagttaatatttccattttttcctcctcaaatctatccttcacttacctaccaagattatcttaaaatggaaatcttagcaaactcatgcaaggacatgaacatgtgagtcctttgcttgaaattatccaatagttccacattatttagtaatgaagttcaaaatttaaattccaatactcagcacagagatgctctattgttttgctctcccttcctctcctgtatcagccacaaataacacttggtagtgtctttcctgtacacagtctgttcttctggcccactggggcttcccaaatgataggtactctggcaagaacatttttctctttcttctctggctggctaattccttttaagcgtaatctcttccaaaaaacattcttcattcctcagttttacttagaagcctctcatctattttgccaactcacatgactttaccacactgtttcatagctgttcatgcatttacaactcttccccatgacttttcttgagggcaggaattctgccttctttgaccttgtaatccaggaacctaaaacaacatttgcttattgaacaagatagctgaaattgtaaggtcctgatgctccaaagaactgtccaagtctttcctgaactcccttctcagttactttcccaagaataataattataaatatttgacaactgaaatacattggaagtagtggagctattcatcatatgcaatcaaacagaaatactttgcaaagagtgcccaaaggaacatgagagcaacatcttttctcaggaagcaagggatgaatgtggattttaattagaggtgttggagatgtgcctgcctgggctatcagtttcagttcagtaaagaaaagttatccaaatacttgaataagctcagtataatgccattatttaatcaagctctgtgttttgagagtgtactggcaaattcaaaattaattaaacactcttctattaagggtcagctacttatgttcatacattagcttttcttgttaatctactcttaaacactgcatatattacactttgcagtcttacacacaatggctacagtcagaaggaaataacagtgcaaatgaagatttaactatcatgaaggtcatcacagtgtcttacaaaataataaaaagatgtaaatatctttaatgcccaactacttaaaataaggaatagccaatcaatgtgaatatcatgaatccattaaaataatgatattgaaaaacttccttggtatttatctaaatgagttgaaagcttacatccaaacaaaagtcttcatcaactgaaacaaacatactattctagtaaaagatgttaacattcagatggataagtagtttctcagaaattttattagcatgacctaatctctcagattgtaaaaactgttgagactgaattgtatgtcttcttcgaagttaaagaacataaaatcccataaatcagctagtcagcaggcccacttaattttataacaaggataacttttgatcaaatcaatcaactgttttgtttttataagcaggtaagtttgagatgaatgaagcataaggtctcatctttttaaaaatgctttattctccagctaatggagcctctttgagagcggtttctctcaaaatattattttactattaactgtcattgcctccaaaacccaacagaaacccgttggtcacataaaggcaagtttattaaacctacttaagtaaaggagaaaaccacatggacggataccttagaagaggaagttagtgaatcaggtatctaagtaagttttgtttgttctgctttgttaaatacaaggacagtaaattaggcctggtccaagtgccatttaacaggtaccggaaattatgctggtttcaattctcccatccaacaaaagcccttagctactggtaatcttatctcaacaaacctattatatatccaaagtttaggctgagctaaagcagcaacaaaaccaactgaataaaatgatgctcattcattgaaatttcaggtaggcccacacaattcatatttccaagctctttataagctgtttgaatgttaaatggagtggcattttgctttagaatgtatagaaatggaaacaaatgagtttaatatacacaacaggctttgacaacatgacttcttcgacagatgtcctatactacttcccacactttcatccttaaaaagcatagtctacttgccaagatacaaacggttgccaatattcagctgcaaaagaatttccaacagtaggaaccagtggaaagaattaaaacactttaaacttatttccaaataaccaaatgtatcattataaagttgtaagataaaaaataatcatgctgcaagttcttactctgtcaactagctagttcagcaaagaggaggggtctttggcaaacaaggctctatatttggttgccagatgacttttttaaatctatcaattcatttttctaccccaaccagccagccagcattaattgagcatgtactatgtatacacacaagaagtagatggcataactcctatctaggaaaaaaaaaaagcatacaattcatttgatgtgcaattcatgcatcaagacaggactgatttcaattgacaatattatgagatagaaataaaagtggtacagcatcagcgtattagtctgttctcatgctgctatgaagaaatgcctgagactgggtaatttataaagaaaagaggtttaattgactcacagttttgcatggctggggaagcctcaggaaacttacaatcatggcagaaggcacctcttcacagggtggcaggagagagaatgagtgccagcaggggaaacactagaagcttataaaaccagcagatctcatgagaaactcactatcacgacagctgcatgggggaaactgctcctatgattcagttacctcccaccgggtccctcccacaacacatggggattgttggctgaactataaaattggaactataggaattatagaaatgaactataattcaatgggaactaggattcaagatgagatatgggtgggtacacagccaaatcatatcagtaattctgttggaaaccttgtggctggctaacatcacatcaagcttaattcagcttgcaccatcatttactgctttttattgtatttttaatgttctctgtcctaaagtgaattctgaaccacaagataggaagatatatgacttgtctttaaattcaccacagtgccctgtacactgttctatatatattgctacagtgcctagtatgtgtctctgaaaatagtagatgcaaggtaaatatttattactaaaaagatgtgcaagcatattttacgtttgtcgagtttttaaactaggggactttactcttcagtttgtctgaatagtatacagctattgccctggaatgatgattaaatagtgcctccttttacttttgcaatattattgcttggattataaattatctggttatcttctggctctggaactgcacacttacaatgttgcctcaaccacttctgaatgcatctcagaggcaaagactgaggcttactcattattgcttctccaaatctatttctgtactccacctcttctagggtctgcatcaatgatccaaggaaaaaaaaacaaataatagagaaactcataataaactaaatcagattgaatacatctagaaaagaaacaaaagtgatccacatggagataaattaggcaggcaaatattgacctgaatgttctcctaaatgtaaatgatacaaaagttgtctccttgtatttaaatccatacagcagtgaaatatcattgtcattgtcaaatatctctagatccctgagtttattcagcataatttcaaagttatttgcttgcagggagagatcaagaatgaatatgttggggctgggtgcagtggctcacatctgtaatcccagcactttgggaagccgacgtgggtggattacttgaggtcaggaattcgagaccagcttgaccaccatggtgaaacctcgtctctaccaaaaatacaaaaattagctgtgcatggtggcacacacctgtaatcccagctacctcggaggctgaggcaggagaattgcttgaaccctgggagccagaggttgcagtgagtgaagatcgtgccactgcactccaacctgggtgacagagcaagactctgtcaaaaaaaaaaaaaaaaaaaagaatggggatgttggtttcagagccaagtgactttgggtcacaatgctgcgctgccataaatggcttcggtaaccctggggaagaaataacacctttctggtatcagtttccatgacacttaggccttattcactcattcaacaaatatttatcaagttactattctaggctctgggtacccagtagcaaatagaacacatgcaaatattcctgcctttatggagctgacattccagtagagataggtaaatggacatagtaagtaaaatatataagagaaatgataactgatacagaggaaaatacagcagggaaggagcccaaggagttcagggatggggtgagaagagggactgctttgctgccatggagcccttggggttgggatataggggacataggatgactgagaggctggtcttcctgtgatgactgactcaaaaagggataaaagggtagaaaacactctgtagaggtaagcagctaggtgcaggcatgggcagtggttggtacactgcttgttaaataaattaggaagtgagtgaatgaatgaataccttcaatagatattagctgccatcctaagatgtagcaaatctgtcacctgagaaaataatccaatgaagctaacgtcacctagagcttaaccattaagattctgtaagtttctaaactgaaacatctctcttaattaatgaaagagattcattttttcggtcatgattcattcctttcttgatagactattgctacgttatcactagataatttaatatatgcaattgtgatttagcagtcacttaaagttttcatattaaatttgatgaattaatcccaaatctaggtaacatagaatgtaaaggcaataatggaaaacataaagtggtgacaaattaagagtaaattagttacaagtagcctaagaccttactaactaccttaattatttagcaacagaaaccggtgctaacattttaaacacctttacttattcccatccaaaaaataatcagttacaaatgcatagaatagtcactactgataacaattacaactaatatctattgaacatttacttggtgccatcaagcactattctaagaatttttcatgtaacactggtcgcggtggctcacacctataatcccagcacttggggaggctgaggcgggcagatcatctgaggttgggagttcaagaccatcctgaccaacatggggaaaccccatctctactgaaaatacaaaattagctgtgcatagtggtgtatgcctctaatgccagctattcaggaggctgaggcaggagaattgcttgaacctgggaggcggaggttgtggtgagccgaggttgcaccactgcactccagcctgggcaacaaatgcgaaactccatcttgaaaaaaaaaattttcatgtaacagatcctcatagttaaaaggttcattagaagccatgggaaattcagtcttcccctaatgcatgaacagccttgaaggaaaaacaaatatctggttctggcatgaggagccctgcttcatggtatgcttatctttgagcagatttaaatgcttatctttgagcagatttaaatatcgaaaatttaaatattgaaaagtttgaagatttaaatattgaaaagttctttgtatcaaactaaatttcacctttctaaaagtgctattctttgatcatagtcattcaaaaacaagcctgagtcttatttatttatttagaagcagggtctcactctgtcacccaggcagaagtgcagtagtgtgatctcggctcattgcagcctccacagcctgggctccagcaatcctcccagctcagcctcctgagtagctggaattacaggtatgggccactgcacaagctaattttttaaaaatttttaggagagacagtgattcaccatgttgcccaggctggtcctgaactcctggactccagcgatacacctgccttggcctcccaaagtgctgcgattacaggcgtgagccactgcacctggccctgaatctttttaatatgaaaacctcagattatctaaacaggagtttttattctctcccttttccaggccacatcagtctcggttcttttggcagttccgaagacatcatgattcccagatgcttcaccatcctggcaacacccttctggactgattgctccttgttgatttcctcttaacctgtggtatctgaaatgaatcccacaccccaggtgtgatatgacgattgcagggcacagaatgtcagtcagcttaatttctctgctgtacatctatgaataaggcttaagacagaattcctcacatattcttcatttacatgccatcacccttgggcctctaccatccaattctaattaactgtgcacttgaaattgcagtcatttttattagcaagcttaaataactattgactctgactttgcattccagtgtatttactatctctttatgtttctgtatatttgtttgattggatgaacggtcttccatccaggcaaatatttagtctttactcagtattctttatctatgttgttcaactaggaaaaaacacacttaatagtatttttatccaattcacacatccattatagctaccacaagatacttttgcaaatattttaccaaaataaaaaatacactatttatacagcatattcctgagttaccagacaagtgatagtgagattatggctagttttgtgtaaagtgggaaatgcaaatgataacaatgggctttgggaccattttttattaatgaaagataaggctttgtgagagagaagtaaaagaaattataggcagtatcttggaagatcattcagatattaaattgactttgtaatatagaaaaccaatttagttgagaccaaggcagtgtaacttgtggggaacatcaaatagtgaacacagactggggaatgaaaatgtggtttgacaacatccaagttttcataatagataaactagggacaaatcagcaagttaacagcttaatacaaactcaaggaggtcaagttgcaacatcagggtctttgagctcattttcccttgaaagagattaaatgagagctcatactcactgtgaagagtgacacccagagaaaattcacaggagcacataatgtgagtgaacaaatatttaaataagttggtacctttttgcctggaggtaagaagacagcggtgatttaacaacatgttttggagactttctgcaaaaattaatgatgcctattacattctaccttctcttaggaaatataaaagtatgtgattttaaagaaaagcagagggaataggtgcagcaacctaggaaggttacctggcagtagagggtcattaagcactgggttcttgttggggaaattttcaaaatatcttcaaggacccatttgtccacacccaattgccatagaagttcacagaggaaaagcccaagctaagagtatatcatttatatcaccgaattagttgttggtagaagtcattggcccataccatcttgctacgaaaagcaactctttttaaccttttcccaccactatacaacattaaaaagtcaatcacttaattctaatttattttgaccttagaaaaacccagcagagtgggaaatttcaacagatacaagagaaaaataaaatggcccctgtcctcacaaagcttacaatactttttagaagaaatgacttaaacacaataaattctcagtcaatgtgagatagtacctactgtgtggctcaaacataaaatgttataagagttcagggaatgtaaaatcaatgctcgcatgaagtaaactaattcagtttacacaacgactcttttgctaatctcattccaggcagacgacagaatgcctgaaaaaaaattgattgcgtagtttctagaatatgaatttgacaatctgatcatttttcttatgaatagacacaaagaaatagataaagacagcaaatgttatactcaaaggcttacataatgttaccttcaaagatggcatatgtttgcactttattttttatttccataaaagaaatggcagaattcctgaacagcatgttccatttagaaataaaagcatgtactctctcgttctcctttccaatactggaaaatcaatagtgtgattatatggagacagaaaaggccgggtcatctgaactaacaatatcattgctattattaataataagagtgcagtatctagaatttatttaacgtgattattttgccatcatgaacaatgttaatccccacaagaacagatggtacaaccatattttaaattattcaatgaagtgtgttttttaaatcacaaatgtgtatgagcagagtggatgcatttgaaatttaacccttgcttatatttttgctgtcatacagtctaagagataaccagtcaatggagaagtggccttttctctctcttgaccttttggatacaatgatgatagaaaataggtaatgaggggaaaaaaaatcacagaatttcatatggaaatttttttaaagagagaaaacaagagaaataaatgacttgtttagggtggtacaagagggtaacactaaggtggcagtctcttctcagtgagctagtaaacattaaactattgagatcaaacaggaaggtatctaagcccactctccagtgcttttctgcaacgacacgctcttcacagggaactataattttagcgagctccatgaatacttagaagatcatgatagtcagggtacttgtcttttttgctttgggctattcatacttacagcatagtgagaaaacaagagaaagcttctctggggtttttctaaagatatcacatgcaaaccctgggcttggctacagaccttgggccttgctcatagatatggaaaaattggaatatgacattaatgccgaaagataacaaaggaaaatgctatgacctgaaaggtgtaggatagagtgggtaaattggtcctccttggatcaaatatggacagcaggcctgagtttgtccaacatatttttaattttgtttttccttttgatccaacatttaaagcacacagaaaatgtcacattaaagttgagatttgggcttcttttgaatgtttaggaggtttaaaaccttcagttcccagtcgggcgcggtggctcacgcctgtaatctcagcactttgggaggccgaggcgggcggatcacgaggtcaggagaacgagaccatcctggctaacacggtgaaaccccgtctctactaaaaacacaaaaaattagccgggcgtgatgtcaggtgcctgtagtcccagctactccggaggctgaggcaggagaatggcatgaacctgggaggcggagcttgcagtgagccgagatcgccccactgcactccagcctgggtgacagcgagagtccgcctcaaaaacaaacaaacaaacaaacaaaaatacctagagttcccctccctacatattgccagctatctccttcagatggggcaagcattctccagtttgacaatccccattcaagttctgtaactcagatacatttcttcctggttctgtaagtatttaatctgaaggcctttcaagtaaaactgagttaggaaaaagtaaatctgctaccacctggtcaaactcttaaccaaaacatctctaaaaccaagcacttttagagaatgtcctgtccttcccaccacaatttacttacctaccaggaactattttcaactctttacgaagcactaaacctgaattccaatcgatctggaattacctcatttgttatgtatcaaaaattctctaatatattatgaaaaaacctaggttttatttaccaatgtatgcctatatttaaatcaagataaataagtcaattttagtgaaggaagaatcattcagtaccacatttttcatgcattcaagaaacatatccagtttatgctggcaaatactcccccaatggtactgacatatattgttcatctggcttatggtgacatatctgaagtttctgataattctgttcccaacatttatatggtattaaattgaccctatgcaggctgaactgcctgaaaatacagattctgttgcaatttgtctgtagttgtaaagaaagtcgattatttaatcagaatttaagaagacttctacatgaccttgataataccaatgatttagtcaaaattatttgacataatacagacaaaaataacacagttaacagaatgtagcctttttgagtagtttccggcaacttgtaagcatagtttaaatccagtcttaatcaaatgcttcagattagcagaaattcatagtctgggaattatgtcatgttgcttatatagaatttatttatttatttatttacctacctatatggggaaacaggatataattcacttttgaaaaatatattactgccatctgcctcacaatataatttctttttgatggctagaaatactaaagaagaagaaaaagcatgatacacatcagtgatttttaaagcagtcttttgtctgccccatggtcatacatacctgagtgttgagtagctataaatgaattcccatggttggtttaaagatagagtccccagtaactaaataactgagctaatataatttgccagttttggcttctgatataacagaggcaattgtttaagaaagcgtaatgtgaaaatgttttaattaaaaatagctgcaaagacaatttaatttggtcattgtgctatatgtatacacatatattatataacatatacaatcttttatgtataaaaatatatagacaaatatcaatggatcattttatttatattcattataagtacttaagtaacttgataattttaacacttataagtgttacctatatagtaacaagagtgattcttcaaacatgtataccatatgcaaattcaaaccaatgtttcctaaatatttatttcaatgaaaaaaatatagtgaattctattaggattaaagacatttttgacattctctttgggaattatcattacagggcacttccagtgtgcataagaaaactgcctcttaattttatagttacttctcattttgactcaaaatagcattcgctaactggatcatcaactttaatcatcaggcttaatgccaaaggacttttggcagcttcatagaactagataaaccttcaacagatggagatttgtcatcaatgaatttcaaaaacatgtagcaaaggctcttttgaaggtaagttcaagaggggaatccctgaaatgtttgaacaatggcaatatccttgagatattactagtacggagctccccacaggcatcattgagaaaggctcaaactccattacattaatgggtaagttctgctgtgttctagccagtctttctgcctcttttctcttcggttcatgtgtgtttttaaaatagtaaaacaaaatgtgtgtaatttccagagtcaatgtcagaggttcacgctctgtttagactttttggttgtgcagattttaacataattgctaaaatgtctcatcagaaataatgaaaaatagttatcgctttcacattcctttagtgcacattcctttgcagcatccatgcaggtgcattagagatttgatttttggggaacctaatgagggtcagactggtcagcctgtgggtgctacatctgcagtttactaccccaatcctctggtgctgtgagatgggtcagacttggcagtggccaagattgatgttatgtagactttcgagttcatgaagcaaaatccaagaatcttaccttcactcaacatggctacaactgaatctatcagctgttcttccctgatttacctccctgtactttctcatctggtaaccttctagttattcttcaagattccactgtgatttctactccatgtgcaagattgcttgctggaatggagaaaaggtgagtgtagggaaggtaaagaaaacactccctcatttagctattaattcattaattatcaataaacactttttagggtgtccattgtgcaccaatcacacacttgggtctcatggatgaatatcacattgctcctgccctccaagggcccaccactgagggaaggagagagacaagtaaaccaagcacaatacagtgtacaaattatcacaggatagatgtatgggcttttaaacacagctaagaagaaaaggaatagtaattcatcggaatgaggaagtaacattagatatagctttgggacagtgcacagaatgtatgtaaaaaactttaagtacttttgtaattaatttgaaagaatctgattgtgttattgtaaaaatgtttaacagctttccaagcccattattgtgccaggattatacttcctgccccactgacaccaagctgatcttgcaacccactttggccaatggcatgtgcatggaagagatctgtggcatttctaaacagaagttttaaaaaatcactgtgtgcccctgccatctcccaatttcttctgccttctcaggatgggcagctcatttagggttggttccagaacaaaacgaacatatcaatatcatccagccaagaacaagtaatgagagcaagaaataagactgtggctgtagcaactgaaatatcagggtggtttgtaacctcagcctaattagtcaaaataagctgaaacaaagaagctcatcgtagtcaggggcagattttaagaagacgtgtatttctttattcaaagcaggctgacacacggatgttgagctggtaaaggctaaagtattttgtaaaataaaatggtaccttctctaacctttcataaggtttttgacaataagctttaagattctctggctgccaagtgaggtgggactctccatgccatgccccaatattccctcaaccacactgatgaggagattttgcctatttcccttctccatgttcatttccctggctctggggtctgttctcacacctgtctcttcccattgttactcccttagtaagcagtgcttgagagtgcaggttgagctggcaatgaagtcttttgaattttcaatacatctgggtattacttcaagtatcattataacaataatacactaaagtttgcaacagaaataattgcagccacaattcaaagaacactcttttgcagtggtaagtctcaaatgtgttttgttttgtttctgtatcaatatggagagtaaaaaggaagaatgtagaataatgtagtagaatgttgtagttttggaatatccctttttggcgggggaggtggaaggacatccaggctagagtgcagtggcacaatcgctgcaaccttgacttcaggactcacacgatcctcccatttcagcctcctgagtagctgatactacaggtgtatgccaccatgcccagctaatatttttttaaattttgtagagatggggtcttgctaagttgcctaggctagtcttgaacttctgggctcaagtgatcctcccgccttggcctcccaaagcactgggattacaggagtgagccaccattcccagcagctagggaatatcaacaacaacaaaaaactgctccccaggtgagtctgttataattttctgcctcccatccacatgttgtcttctgaccccaaatccagattgaaaggccctgcttcacatatgtgagagattacaaatcaaagaacaatgcttttgatgcataaaagcataaaaataccattagcagtcctgtgttccactgtgaacagcattaatgcccttcacccagagtgttccagcatcttcctgagttacctgagatcatcctgctttgtacatgttgctgggtttatgcctgtcttcttgtgaagttagtaatagtcccccttttactacttgagacagcaaattatttgatcactccaaatctaggttcattaccaagaaatgttgaggcccaggaaaagtttgtgctggaaattttccacagtgctccctcacattaagcagatatagtttttctcccaaatcgattccttctaacgtcgttataaaactttaaaaatgctctacccagtaaaaccttgaacccattgtgcaaaagtattccttatttaaccttggagcctttatatgaatttttcatattaaactcccttacttaactccctcttcttacctgccacaaatatctttactcatagcattcatggcttccttcataggacagagaaatgtatcaaatgattttagtttaggaaccaaaagaacaacactgttttcagcacgttaaaaatgcctatattctaacattggttaaattatgtaggttttctcagtctgaagtcttatgttggtgggggatatggcagggtgtgtaattagttaagagtggcaggaaaaaaaaaaccacctactttatggtccacccccattcccaatctccactacaaaacagggaggaagctccacagaactatgatttccttgaatcacttcaatttgtacaacactatatgcagaacttttatgaagcaaagatttgaactattaataatagctaacattgcagctacccaagggcacacatatctctaccaaatggaagctgactagcagaattcagtttctatgtgtttgccatttagcagttatttttccaccacttgggttataatgcaccatactgacatccagagcaatgccatttctgccttattttaagataaaatgctaaaccaaaagctctattctgactatgtaaatgatcgccttgtgccaactgattagcatttttaaggcaaaaaatttcaaagagatagcatgttacacacattacacttagcgtgaaagcaaataatatattggctaatgtttttgtagcaccacagtctttctctgacctatgaactataagtaagatggaatgtgttatttaagattttttctctaaaataagtttcaattcataacaataagttcacaactcaatcactctgtcagtattggctggtaacaaaaggaacctggtgggtcagcagtttagcactgagtacactgtgtccatctagtggccaaaaggtgactgagtgctctaaagaggtttcacagcataaagaataaaaggcaaggtggctggttttttaaaaacaactttaacccaaacactgtgcacacatttttaaattctaacaactattaatcaaatcactttcattttctgcaaagactacagcaaacgtccttcttctttcttctcaaatacttgagtccccacttcccacacacagcagatgatattcctactcaaagagaaaatagtaaccatcaaaaaggaacattctccatgtccagccatcaaaatgacaaacacatctactcccacagtcatcatttccattttccctcctgttaccaactcgggcaaatccttccacctgtgctttggttctttgtccttctcacattctctgatacgcagcttcatccatttttcccttactcttttcctcctctttaccaaatcttttccataagcacttatttttcactgtacaaaataagatccctctcaattcctacttccctatccagatacttcttacctcctcctcactctgagcataatttcttgaaataattttgtttatattcactatcttgattctccctttgtacttacacctcaacccacttcaatctggtttatgctcctactatatggaaatttctcccattgggtcaccaactgacttgtgtttcactaaaccaatgaacatttctgaagctattggccactccctcctttctgaaacactcctttcctttggcttccatagcacctaactttcttggttttcttcttaagtctctgttcatgtctttcatttcagctttgtcttcaaatattggcagttcttaggcttgagacaggactctcttgttctcctaatcttgcaccccctttagttgattttattgactcaaataacttctatgaccatctgtagatggatagctccccatcaatttctttggtctgcatctgcctcctgagctccagacacatacagcgcacctgactcctggacagctctccctggggataaccgacatatacctgaagttcaaccatggaactcttccttctccaatattccttctcactgtgattagaacctcagctacccagttgctctgttttgaatcctgaaaataatcctaaccctttcctcaatcttgtttcacagagtctctcaattaccaagacatgcagactccacctcctacctctatctctcagataagctcactttcctccattgcctctgctatcattctgctccataccaacaccgctgtctgtaataatcttctaaatggttccctgcttgcatcccaagtaattctatacaatgcagccactgactttaaaaaacacaaatgcccatgtcattccactgtaatgtcttccaatgagcttgacagccctcaaacattcttgaccttctttctcttgtatgtcacattccagttgtctacatctttagtttctaaaatatgcctcattttccttcccattgcacatgatctagaaaaaccttgtccaatccatgaggcccaggacggccttgaatgtggcccaacacaaactggtaaactttcttaaaacattgagattttttgtttgtgattcttttttttagttcatcagctattgttagtgtattttctgtgtagcccaagacaattcttccattgtggcccagggaagacagaagattggacacttctgatctagaatattcttcccctctccattgatacatttatattcacacttgaggttttagcctaaattttactttctcagtaaaccttcattgactacttctaacataagatccgcctctgccactcctatcaaggctttatcaaacagcttccgactaagctaaaagaaacactctatgcattttaaaagtagtgtatttaatagatctgattcattgcactggtgatggaagagttgaaatgccaaataggggactgtgaggcaacttaggggttagaaacaacaggaagcaactaccgcccctggactagagctaaaaaggagggctgatgtatgcaaggattagggtcacctagctaagggtgaagccatggaggagacacagctactgcctgaggtgctgcctcaggtagagagagtaaaacactctggcttctctctttctgcctctccccaaatgtccaccagtgcctccaatgtgctacatctatctaacaaaggacatggaagtcttgagaccacagccttcagagcgtagcctccaactataaagggcagagaaagggcaatatgtggtctgagaataaataggtaaaaggccaacacaaaaacattcatcacatttaatgtctttactcctaaagattttcttccagtccaaactgtaagaatcatgaggacaaggactatggcttaacagattttctcttttaaatagcaaagtgactgaaacaggcatatctcattttattgtgctttgttttgttgtgctttgcagagatggctttttttttttttttaacaaaatggtttgtggcaaccttgtgtagagcaagtctatgggtaccatttttctaacagcatgtgctcacttcatgtctctgtatcacattttgataattcttgcaatatttcaaacttttaaaattattttaatacctattatggtgatctgtaattgctgattgttgatgttactattgtaattgtttaggagtaccataagccatgcctatataagatggcaaactcaattaatgggtgttctgactgctccaccaactggccattccctatctctctctttctcctcagtcctccccatccctgagacacagcaatattgagattaggtcaattaatacaatgacctctaagtgttcaagtgaggtgaagagcagcacatctcttactttaaataaaaagctagaaaagattaagcttgcttagtaaggcatgtcaaaagtcaagacagacagaaagctaggcctcttgtaccaaacagccaagttgtgaatgcaaaagtaatattcttgaaggaaataaaaagtgctactccagtgaatacaaatgataagaaattgaaacagccttgttgctgaagtggagaaagtttgagtagtctggatagaagatcaaaccagccacaacattcccttaagaaaagcctaattcagaacaaggccttaactctcttcaattctataaagattgatagagatgaggaagctgcagaagaaaaggttgaagccagcagagactgtctcatgaggtttaaggaaaatgccatctccacaacacaaaaatgcaaagtgaagcagcaagtgctgatatcaaagctataggaagttatccagaagatcattgaaactacattaaacaacaaatttcaaatgtagacaaaacaaacttttattggaagaagatgccatttagcactttcacaactagaaagaataagtcaatgtttggcttcaaagattcaaaagacaggctgatcctcttgttaggggctaatgcagctgagggctttaagttgaagccaatgttcatttaccagtctaataatcctggggccattcagaattacaccaaatctattctgcctgtgcttgtgcctgaaacagcaaagcctagatggcagcacatctgttgacagcatgatttactagatattttaagcacactgttgagaactactgctcttatataaagatttttaaaaatatattactgctcattgacagtgcacctggtcatccaagagttctgatggatacatgatatggtttggctgtgtcgccacccaaatctcatcttgattgtaactcccacaattcccacatgtcgtgggagaaacctggtaggaggtgattgaattatgggggacaggtctttcctgcagcattctcatgatagtaaatgagtcttacaaaatctgatggttttaaaaacagaagtttccctgcataagctctctctttgcctgccgccatccatgtaagacgtgacttgctcctcctagccttccgccatgattgtgaggcctccccagccctgtggaattgtaagcctattaaacctctttttctccccagtctcaggtatgtctttatcaggagcatgaaaacagactaatagagtaaactggtaccagtagagtggtgcagtgccgaaaagatacctgaaagtgtggaagtgactttggaactggataacaggcagaggttggaacagttaggagggcttagaagaagacaggaaaatgtgggaaagtttgaaacttcctagagacatgttgagtggctttgacaaaaatgctgacagtgatatgaacaataaggtccaggctgaggtggtctcagatggagatgaggaactttttgggaactggagcaaaagtgactcttgttatgttttagcaaacagactgctggcattttacccctgccctagagatctgtggaactttgaacttgagggaggtgacttagggtatttggtggaagaaatttctaagcagcaaagcattcaagaggtgacttgggtgccgttaaaggcattcagttttataagggaagcagagcacaaaagtttggaaaatttgcagcctgacaatgcgatagaaaagaaaatcccattttctgtggagaaattcaagccagctgcagaaatctgcacaagtaacggggaaccaattgttaaccccaagacaacgaggaaaatgtctccagagcatgtctgaggtcttcatggcagcccctctcatcacaggcctggaggcctaggaggaaaaaaatggtttcatgggtcaggcccagggtcaccatgctgtgtacaggctagggacttggtgccctgtgtcccagccacttcagctgtgactaaaagtggccaaggtacagctcaggccatggattcagagggtgcaaaccccaagcttggcaacttccatgtggtgttgagcctgcaggtgcacagaagtcaagaattgaggtttgggaacctctgcctagatttcataggatgtatggaaatgccaggatgctcaggcaaaagtttgctgcagtggcagggccctcatggagaacctctgctatggcactgtggaagggaaatgtggggttggagcccccacacagagtccctactagggcactgtctagtggagctgttagaagagggctaccatcctccagatgccagaatggtaggtccactgacagtttgcgccatgtgtggaaaagcagcagacactcaacaccagcctgtgaaaacagccaggaaggaggctgcaccctgcagagccacaggggtggagccgcccaagaccatgggaacccaccctttgcgttaacatgacccaaatgtgagacatggagttaaaggagatcattttggagctttaagatttgactgccctgctggattttggacttgcatggggcctatggcccctttgttttggccaatttcttccatttggaatggtatttacccaatgcctgtacccccattgtatctaggaagtaactaacttacttttgattttacaggctcataggtagaagggactccccttgtctcagatgagatgtaggactgtggacttttgagataatgctgaaatgagttaagactttgggagactgttggggaggcatgattggttttgaaatgtgaggatatgagatttgggaggtaccaggggtggaatgatatggtttggctgtgtccccatccaaatctcatcctgaattataactccaacaattcccatgtgtcgtgggggaaacccagtgggaggtgattcaattatgggggcagctctttcctgtgctattctcctgatagtaaatgagtctcataagatctgatggctttaaaaatgggagtttccctgcacaagctctctctttgcttgctgccatccatgtaagatgtgacttgctcctccttgccctccgccatgactgtgagtccttcctagccatgtggagctgagtccattaaacctctttttcttcccagtctcgggtatttctttatcaacagcatgaaaacagactaatacaatacacaagattcatgttgtttttatgcttaacacaacattctttctgcagccatgattcaaagagtatttcaagtcttattatttaagaaatacatttgggaaggctactttctacagtgattcttctgatgtatatggataaagaaaattaaaaatctggataggagtcaccattctagatgccattaagaacattcatgattcatgggaggaggtcaaaatatcaacattaccaggagtttgagaaaagttgattccaaccctcatggataactttgaagggttcaagtgaaggaattaactgcagatatggtagaaatagcaagagaacaagcattggaagtggagcctgaagatgtgactgaattgctgcaatctcagcaacaaagagatgagcagttacttcttatagatgagcaaagaaagtggtttctcaagatgaaatctactaatggtaaagatgctataaaaattgttgaaatgacaataaaagatttaaaatattatataaacttagctgatacagcagcagttgggtttcagaggattgtctccaattttgaaagttctacattcggtaaaatcctatcaaacagtatattacatgttgcagagaagtcttttatgaagagaaaagtcaataaatgtggtaaactttattgttgcctggttttaagaaattgctacagcttctctgaccttcagcaaccgccaccctgatcaatcagtagccatcaacgtcaaggcaagacttcccaccagcaaaaagattactacttgctgaaggctcagatgatcataagcactttttagcaaggcaatattttaaaattaaggtatgcacgttgtcttctagacatgctattgaatacttaatagactatagtgtaaacataacttttgtatgtactggaaaaccaaaatgtgtgtgactcactttattggaatattcactttattttggtcatctgaaacccaacctaccatatctctgaaccctatacttaagagatgttcaggaaaagttggctgaatgggtaaatgaacacaataccattgttcacatttgcagatggtgcaaatgagacctatagaattcacgtctgtaatcccagcactttgggaggccgaggcaggtggatcacctgaggtcagaagctcaagaccagcctggccaacatggtgaaaccccatctcaagtaaaaatacaaaataaaaatggctgggcatggtggtgggcgcttgtaatcccagctactttgggaggctgaggcaggaaaatcgcttgaacccaggaaacggagtttgcagtgagctgagtttgtgccattgcattccagcctgggcaacaagagtgaaactctgtctaaaaaaaaagaaaaagaaaagaaagaaagaaaaacagaaagacaaaataagacaagaaaataacgacctacagtcccacagctaggaaaatgtgaaccgttaatgtgactctaatctgactccttattcttgttactggaccatattgacttctgatctgctttcttattattttgccttctaatacactatgatacatggatttaaaaagaacactcagccattctgtggttttgatacatagtgctgaaatcacatctttgattcttttactatttatgcacttaatgaacatttattaaacatgtaataaatttgataaaccaaaaactgtgtagaaagaaactattaattttgttcatcattgtattaccagaacttgggacatgtcttgcacatcataagccttcaatacatatttggtgaaagaatcattgcataagtaaatttcaatgacactaactgcttaagatacagagagagctcttgacattaaggaattctcagtgaaacctcactggaaatagtctatgaattaattaagagatactgaaggattttgaactgcagaggacataccactgaaacaaagtaggcgctacttgcctgctttctgaatctgctttgtttgttctctcaggctctgtctgtggctggaatccctacaccttctatcgttgttgaactgctttgcatgttaaaaaataacacattttgggaattaactgtacgattggttaagcaaggggataaaaacaaacccagattggtaccttgttaacctacaacgatttctggaccaggtaaatcctcaatctctcctctgccaaaagaaaatgacaacgcataaaaataatgcagaaagcttaactgacatagttctgtcagtgttactactctggatctgcaatgaaatctgattgcttgcacttacatgaaactttctcatggatattgcagcatccttccccaatctcatattttattggcaatgcaagaagacataatttgcatgagatgcagaaagtggtaaattagaaaaattaactacgaagttgtttgccaatagaggtttatatttatcttagtataaataatttaatgtgtattttccttcatgattgaatttataatgaatattcgatgattaatttatttttatagaataaaaactgtttttaatggcccttttaactgtactctctagctttggtttcagtgttatcaaagcagaaacatttactccatttctaagtattttgagaagataattctgttaaagtttaaacaatagtgtttttaaaaaccaggtgaactttttctccttaccctgtcttatgtactgaaaaaaccaggttaatttttaaaagtattcatttgggaagcaactttctgagaggcgaaatattcttacatcagaaaagacagaagcagaggctagtgcctggaatgtgtttgtctctatctcggtagttccaacagtgcttacctgtttcacattctatacattttggcttcaaatccagtggttgtcaactctggatgtaccttgccttgaaccctaactctggcaatttaatagaatcaaaatctctccaggctggggccaggtatcagtattttaatattacccaggtgaagctaatgtccagccaaggtttcactctaacaggaatttgagacagcttgtttggtcagatgatcctatgatactgaaatcatcccaaaggtagctagcagatattagtagtccaaagccctgtattagattttgactctaattctaataaactttgtggagctaatgaggcatccacttaatttactcaatctgttcaattcttttagttacggaaggaagctaattcagtcctgtgtggttgttaactaatcacagatctctaatcatctgacaaagttagagacacacatgccagaatactaaacatttctacaaaattttacatggcatcccctagagcatgtgaagtcagatatcaattcctctaaggttcgaggaggggatgccttgttaagacataaaaccaagaacaataactgactttataatgagtcaaactagccatcagtataaggaggccttctaacaattagaactgccctgtaatgttaagaagacattaaatgtgaaaaatgatgtccatatggaaaaaatacagaaaatagacataagtagaaagaaagtagaaaacagacaaaattatagtatatataccatatatgcttgatatatattgtatatacttttattaaatgtatatgttatatgattataaatgggaaagaaatattacaaaatgaaaaatccataggaaaatggattaaaactttactgtgaaagtattttaataaaagtataacaaatttttaatgtaaaattaaagtagacaaacattatgctaattaaaaagattttatcatcttccctttgtggaagacatagcaggataagacaatactaaattacttgggaaaaggcattgcagaaaccaactgtgttagaaaattaaacagttgtcacccaaccaccagatgatgtcaagatatcacatttgttactattcaaggctactcaggaacaatgatttaagcaagagaacaccatgagtggtactgtctgaacatgacctagatagctcatgctgggtcgtctggacaatatgctaacagttggcagtgtcccccagcccatctggagaggcctccctgaaatacagcttccaagaagacgggtgactgccttttcctggaaaaagggagctgcagctttccatgcttccttaaggtctccaagcctggacagctgactttcctagacaattcctataaagagttgacatctaaaccccaacagtctggtaaccaaaaggtttatctgtaccccaactgggcagattcccctttacattcaccctaaagaggagagcaagaggcatgatgcagggtcggggtggtacaagtctcctctcttctagccaacacttgattagtaaatcactcaaatcctgttcctaccccatactgtgtgctgttgcagcacatgtgctctgccaagatatgtgtcagccatgaaggaacacacttgtcctcaaggcaggatggagaggatgttagtttcctcaagcaaagtcaggaatgaatttactttaccattatgggctactttcaaatatctaagagtcctcttggggagcacgctgctttgttctgtttacaacttcatagagcaacatgtactgacataaatagctaagaaattttaggtaaaaaaaaaagtttgtttaaaagcatgttgtaaattaccattttagtaaaaaagattatatatatttacatgtatcaaaaatctaaatatgtatacaaaaactcttagaaatagttatctaagagagaagcgaagattataaacatctaagttatatttctgtagtgtttggatttttttttacaaaatgattataatatataatcaagcaaaaataaaagaaacatcaaaaaattaaatcaggttctctttagacacagttttaaaacttggtttcctaagggacactataaaacacagtcatttggtaattaagaaattatctctagaccatctggctacctaggtaggccaaaatgttttgacctttttgcctgtaatcagttaagaacaatgcaagttaataaaagcctagacagcttacagcctgaacttcataatttttccccaggagttgactaccagtgtaattattctcagttcagtcaaaatgttgtaattggtttatttgtgtaggcttcaactaatcattgcctcaaagaaaaccagatttttttcctgcttattactctttagacccccaatttatttctcctagtatgccatcctggaagttgaacagatttttctggaatctagttgtcctttccataggctctcagtagaaagggactccttctactcatgatatatctggcccttacttattgtccattttaataggtcttaatgcaataatagatttaatgtttaaaatttaatgaacaaaattactagcattttgttaacagatactggcctatgtgactggtagttgcaaactctcattcttaagaagtattcttagctattctatgatagtcagattaagtaatggaggcaaataacataagacaatattcatcacctgtttagaatgatcaaattaatgcatcaaagcagtgattttataatcaattgttcttcttctaaatgtgaagaaaacacttctaagaatagcaaatagaacaacttagcctaaattatctccatttcccttcttcaaattattttagtcttcattatcttattatatcatccaccaattgtgtcacttgcaaaactatttccttggattctaccaatccaccctggcaaaattagctagggtctctaggtagtaccaagataccccaggtgtgtcttggctcaagttgttggccaagcagatgatagggtggcatacatcattccaaaggacatgcatgctggtcctctaatttcctaagtagcatctccaacacatcagtatagttctgagcaccctggggttttgtgagaatcagatgagtacaaccccatattatcttatgaccatcttagttaagcagatcaatatttcttcctaaacatcaaaaatataccaccagcaacacttttctggccacagatggagggcccttgcaggtgtttgacttgtttagtccagcaaccagcatgaaatctactaaatggagcagagagcaaataggaagttgggctgggctggtaaatcaaagatacgtcttaggatttaaacccttcaatgatgtaatatttaacagtagaatgaactgtgtctttcatatgtactattttctgacattccattactgacagtagtatgtcataacagtgtttcaaaacaaagggagcagaatggaatgagcctaaggggataataacttgtaaaaagttaattgtaaaaaaaaaaactgcagacaaatttttcttttatcattaagtatttatttaaacttcatactgagagacccctctatttattcctgaatcctttacatataatcttgtaagcagttgcaatgactaaaatgtccttggttagtcattaaattcaattattgactgtatattgagaaggtgtaaatcatagttcaaggttaatttaggggtctcttattaggagttggatgaaatgaaatatatgtgttacataaattgctgactgagggaaaaatatacagttaaaataataatttggatggagatgcattcatatcatattgaaacatgacgtttgtttgtgaggacacaccatatggaaattccccaattccttatactttggttataaatctttactgattatagtaaccactgtttcaggtggttaacctagaaagcttcaagaaggaatggaaaatgagattaaactcacatacatagcatctccaaataaggtttcttaccagcgaaagaaaatcaaagattcacattataaaaattcattactgatgcaaacctggttcccatgatgtttctaggattaagagaggtaacagtccccgcactgaatcacatgctcattaagctttcccttaaagccaggtggccaaggtttcatctctgctaacaaaggtattcaaaggaatttatgataatcattctattgtttgaattttccattgctagataatgcaagtgctcagtgcagagagatttccttaaaaaatgtttctgctaggtcaaattagcacctgtacttggatgttcaagtcaacatttctttctaagtgtcactgatttagaacataagagtatgttagaatattaaaagatctcgggtgtggggaaaagcaagagagatcagattgtcactgtgtctgtgtagaaagaagtagacataggagactccattttgttctgcactaagaaaaattcttctgccttgagattctgttaatctgtgaccttacccccaaccccgtgctctctgaaatatgtgctgtgtcaaactcagggttgaatggattaagggttgtgcaagatgtgctttgttaaacagatgcttgaaggcagcatgctccttaagagtcatcaccactccctaatctcaagtacccagggacacaaaaactgcggaaggctgcagggacctctgcctaggaaagccaggtattgttcaaggtttctccccatgtgatagtctgaaatatggcctcgtgggaagggaaagacctgaccgtcccccagcccgacacccgtaaagggtctgtgctgaggaggattagtataagaggaaggcatgcctcttgcagttgagacaagaggaaggcatctgtctcctgcccctccctgggcaatggaatgtctcactataaaacccgattgtacgttccatctactgagatagggaaaaaccgccttaaggctggaggtgggacatgcgggcagcaatactgctttgtaaagcattgagatgtttatgtgtatgcatatctaaaagcacagcacttgattctttaccttgtctatgatgcaaagacctttgttcacgtgtttgtctgctgaccctctccccactattgccttgtgaccctgacacatccccctctcagagaaacacccacgaatgatcaataaatactaagggaactcagaggctggcgggatcctccatacgctgaacgctggttccctgggtccccttatttctttctctatactttgtctctgtgtctttttcttttccaagtctctcgttccacctaatgagaaacacccacaggtgtggaggggcaacccaccccttcactcgggtcatgcaggaatcatatgtgcaaaaataatgtgataaaaacacacctataaggtgaaaaacatctacgtatttgctataaatacacatactttgaatttctatattctggcaaaagcattggaggacaaaaaaaaaatcttttcaaaatacaaatttgaatatgtatgggcctcacttttccacccactaaagccaacctggttagcaggatatttcgaggattaagagcggtagcagtccctgcactgaatcacacacatccattaagctttctcttaaaattaggtggcttcccattgttcttagggtagaagacctaatatgtctataaggttttgctccagttggcctctgctctcctctctagcctcatctcaagttactggcttcctgttagctctcttcatctcagcctcaccagccctcccttggtaaaccgtactgtccattcagtactgtttcctacatcaggactttgcacatgctgttcccagacactcatctttttatttatttcattctcttgcttctcctaccaccatcaccacctacaccaccactaccatcaccaccttaaccactattacttttggaacacatatccatacatgtgcacatacacatatgtgcacacatgcatactctgaaactctcctcattgttacatcctaggagaaatatttcctgacattttacacataccctccctgttataaaatctcctggtactgtgtatatttactacacaacactgattttttaaaattttatacatatttttagacttttaatgtcaatttctccattaaagttggagttgtctgtttcttctcatcattatttacccaacatccagcatgaaaccaggatacagtggataataatacctaaacattgtttaaatggggcaatgaatgtttcaatcaatgaatcagtcacatctgcacacctctgtgatagatggattatctactgtgcaaaattcaacctgaagagagataaagaaaaagaccattcattgggctcaactattttgacatgactgggctaactgctttgcttatttaaatttaatatcagcaactgcccaaagtaggtattctgattccttttttacagatggagaatctcagactcaggtggacttagtaacccacccaaagacacgtttggtacgagagcaacatggttattctgttttgttttgtttttttagaattttctataaaattgtggcaccatgtttatatctgcattcaatgacatttacatataatttgaatttaggatgatcctattttgaagcacagaaattacttttgaatgctggctctagaaattatgaaaaatagaatataacaaaacctgaagaaagtaatacaacaaactgaaccagcattttagtgttgaaattttaatgaagtaaacatcttccatttaaattagcgtgtgtacaattagaattattaagaattaagtatgacttcagaacttaaaatacaatttcttaaaccaaaatttgttttagtttcagctcacccaatctgctaccttgcaaccacaaatgtgtttatgatttccccctccaaaaacctgcctctagttcagaagactcttcactgggtaattattttccacaagcccaaattgttttctgtggtatgaggctgggttcaatgctctttacacttttgcccatttgcagagatcagcatttcctttcgccagaatgctcctgctgacgagaatgctgttgggcctcccagaaagaaagcagagacagttcatttgaccactgcctgactcaaacctctgctactgtttttttctgtccagataagggagctaaagtcagcaataattggaaaaagaggctctcatttggtcctgttatgctactttttccagtaatttcaaacaacaaatatgtagcatttaatattatatgccagccctctaggaactgtgaatgaagtaaacaaaacttgaaatatgatcaatccttatccttgatgaacttgttagggaagatagaaccaatatacatggaagaatcagagaataatgaagtgagaaactaacatgggctgttacggggtgaatcctatacccaaaattcatacattgaagtcctcgtacatatacctccaaaatttgtacgttgaagtcctcgtacctcagaatatgactatatttggagacagggtttaaaggaggtgattaagttgaggtcataagtgtgggccctaatcaaatgtgacgttgttataagaggagctaaggacacagacacatacagaggaaagaccccgtgaaggaatagagagaagtcagccatctacaagctgaggagagaggcctcagaagaaaccaaccctgctctcttgacttcagacttccagcctccagaactatcagtaaatcaattcctactatttacgcttgcagtctgtggcactttgttatggcagcctcagaaaattaacacatggattctattaaaaaatgattttagggcaggaataaaccagtctgtgttcaaagacttgaggaaagctttgtacatgatatagggtctgagttgaatatagacaaaaactaaataaagcagagacagagggatgacattctaggacagcaggaaactcaatgagataagactagtaaatgggagagagaaatgatttagtaacaggtaatggtctctgaaaccttttaacctttgctatttgttcatcttaaatgttaatgtatttttaataatatatttactcacattggatagataatctcaatttatagtaaacaatgtcttgttactaaaagggctatgctgaagttaacagaaacatactatttaccatatatgtttaaatctcgaaatccacggccatataaaaaaggactatgaatttgggcaaaatgccattgaagcatacgtacaattgtattttgtatgttatttcatatgtacacaggaattgtacatggaaaatgagaaagagaagacataaaacatgaaataaattatgtttgagttcactggtatttcatttatccagattatacacatttattgtcaaaagctttatggatttttctgggtgaagtttatacatatattcatgatcatatgttacaaagcatttaagtatatagcttcatagctatacacatgaaattaaatattaaaaatactggtttttttttctaatttaaccctcttctagaaaaagatcaaaaaaaagttccctcagcatgtgcacatctgtttccattgaggattttaagaaaatgtttaaaagctgcatttaagtgaataatttccagcctgggaatggtgagccagctcagaaccaaaggctgttcatctaaccaataagcaggtgtaaatgaatatttcatgaacactgtctgtaattttctttttacttgcacggcaacaatccctccccaccctccccgcatcttcctgtactgttagtcctctctccaaaaagagaggggtgtttgaatgccacttaaaattcttaccagtatctggtatggtgtcattctttactgttcacattattttttatcttttggattttgctttcaaaagccatttgttctacatcaggcagctgcattttctttcagcattaaggaagaagaataccaaaagtacttacctaaaaaacaaaacacaaaaaagggaaagattaaagtatattcatggagatgcttgatgtcttgacaaagcaccaaagtggggatgaaaacacccatagcacctaatggcccatggcaaataaagcatgtaaagccaccaaggaatgactgtagaagttgcacccttgtctgaaacttaagacagcaaaaggggtatgccttggttattttaaaaatgaataggtaaagcaaagttttgattttcttttattttcacttttttaaacaacttacattatctcagactgtaatccatcacgtctctgtccttcaacaggttctaactgcctacaataatggcttttatcattatgagccagaagactttaatcataggcctaacttagagcttcaatgcaaccataggcctaacttagagcttagagcatcatgaagagtgcattgagatatgccagacactggtggctcatgagagaaacaagggctttgctaacagttgtcttcctaactatgaggcctcctgcaatatgagacattgtagtgttggtagaagggtctgctttcttagacatttttgcggtactaacatagatataaaaactaacacacggccaggtgcggtggctcatgcttgtaatcccagcactttgggaggcagaggtgggtggatcacgaggtcaggagatcgagaccgtcctggctaacacagtgaaactctgtctctactaaaaatacaaaaaaattagcagggcgtggtagcgggtgcctgtagtcccagctacttgggaggttgaggcaggagaatggcatgaaccaaggagacggaccttgcagtgagctgagatcacgccaccgcactccagcctggttgacagagtgagactccatctcaaaaaacaaacaaacaaacaaacaaaaaacaaaaactaacacacatagtcagatgtggcatacaaaagagaaaagtaatttttgtaaatatttaggaaaaaagaataaataataagtggcaaacatcagtagttttcatcaatgtgccatctgtgtatagatacgatgtctttgactgtctgctggtcacagaaagccctctacacaaggaaggcaggggatggccttgaacagtgctcctgagtgacagctctggaataggtgggagaaggcacagtgcatacccagcgaagaaatctgttcactctgtcagttaccaaaagccaaagaaaaacttcctccataggaaatgatttccccattccattcttgacaagcaagagctaacaaaagaaagagtcccaaaagaatatgggacttttgggagagtagaggagatctcatttacgaagaggagagaacatccacgtgctgatagcagcagctaatagagctgcctgatctggtgctggctgggcaaaccaacgctaaaggcagaagcacaaaaaggcattgcaccacaatcatctgggtgacttggtcaaaaccaagaagcacaaaaaggcattgtgcttcttgcttttgaccacgccagaaaggcattgggcgacttcgtcaaaaacatgatgttctcagggcccaccaagatagcatctctggaggtaagattttggaatttccatttttaataagcacccctggtaaattttatgtggttagctgggcaccagtctgcacacagagttttaagaatcacatgctagaaggtgtgggtctgtctcctgtaagtgctacctgtcagagactattctctgagaatgctgagtcacataatttggtcagaatttaatgaaactgcagggacagagatagggaatgtgcatttctcttccctatttaattctgcctcaccaacaaactgctggtaaggaaaaaaaaaatcacacaaaatatattatttgaattggtctgtgccactaaccaatgctgttgtccattcctactgtcccctggttcttgttaataagataacattctgtactcctactcatagagggcactattttcttgtcagttcatgctgttgcagacagttggtaattccaactaccaaaataccataatttcatcagtgaattaagccgagaaatagttttgaatattacagagtatatagtaagatcttccataaacctgagttgactaatttctagcatctcttgaccttcaatttcactaatactgtttagctagttcttgagctatttttatctgaataatgtaaattgagaaattgatttactttgtttttcaggaaatattttaattaatttataatatttctctgctttagacatttagaaatatttattttacttacaggatagatgttgtggcatatttaaaaggataaaaatgtacttcagaaaagttcacaaatttaattctatatataaagagatttgttttttcctaaggtgctccactattaaatgaaatataacttaaaaaaaatcagtcctaatatcagcaaactgtgaactgacctcaaagttaatatttacactcatcagaagctaaatggagccgagtgcaatggctcatacctgggatcccaaaatcccagcactctgggaggctgaggtgggaggattgcttaagcccagcagtttgagaccaggttaggccacatattgagaccctgtctctactaaaaattaaaaaatacatagccaggaatggtggcatgcatctgtggtcatagctactagggaggcagaggcaggaggactgcttgagcccaggaagtcaaggctacagtgagccatgatcctgccactgcactccagcctgggcaatagagtgaggccctgtctcaaaaagaaaaagaaaaagacactaaatggaatggaatgactttaattgcaggtgagcctgtattgccattttaaaagatttttccaagtctgtcttgacatagcattcattttgtatttcataaatgagaagactgtgaagattaaatcaaaaaagctaacagtgctggtcaggagctagaaaacttggggtggagcttgaggaaagaagactatgagaatgatttttaaaacatcatctatatcttagagcataaaatggggtaaagataaactattaactgacacagggtgcaaagcaccacaaagcagcacaaatagctttatagcttctgtaaatcctaaggatcttcctaagactcacatccctctacaccccttcaaatcagattattcatttccttttccctctctgctgtacaagtgacaacagctacaaaatgcatcacccaaagggaaggtcgttaaaaaggcctgaagaatataaagtgtcaagcagtttggctttaactgtggcctttgtctagcagcacatagagtgttgtctttttgttttcttcatttttaaggttgtagtataatatattacagcccaagaccaacagttacagcttccagaggtagctactccgtgattaagagaactcatttacagtatattccatattttttatataaaaaaattaaactgtacttgccttattccacattcaaatggttaatatataacaattatggatatgacataaatagccctaccagaggcaggtcagaatatatatgacagtagggagatgtgaaaaacacagagaaagagaagggaagagccaatttatgcaaaaagagaaatcacaccttctgctattactacatacggtcttggaaatataatattttattaaagtcaaatgaagcatactttgttagagtttagccagttcaactacaaagagtaaatacaaatctaaagtaaatatgcttgctgaccaaagcatccaatgacaatcttatttgaaatcataccacatattcgtatgactggaagccaacttgcatagcgctctttatacgcaaagactgattttatgctgggcacaggaaagaagagagagtggaaaggctggaagagaggtatgtcacatcaaccaacctcctaaacccagatggttttcatcatcataaatcatttccccaaaggcagcaacccatttcatttgctaacattgctcttgaacaacttgcctggcaagtagctttctcattaactttcaaagacatcctatccatgtcattcatctcctgcgaatatacgaatataacatttccattaccttgacttttaatttccccttcaaaataggaattttatgaattgatttgacaggtcatataagtctctttatactattcataaaacttgccttccaatatgctttgaaattaagattataagccagttccatattaacatactaatgcctacccaaaattatgctggagacagctggctaggcacaccaagcctaattaaagagctaatatttttacaaagggattaaaagttacttgagattgaataatacatcttaatgacttaaaaaaaagaactttggactagaaatgctctcaacataggaggaaagtaagggctaaaagcagattgtaggaaaaagattactttcttacttacataagatcctctctctttaatcccatcagacactataaacaggaggaagtttaatctagcaataagagcatgacttttattgtcagacaaagctaggttcatggcctttaatatagttatacccagtttgaatcattctgctttctcatgaaaaaaaaaaaaaaaaaaaagagaaaatatggaaagaaagaatgacctagaaaaaagtctagaatacaatacatactgaaaaaagactgtttcaggtcttttgctttctcacataaactagctcagtaaaccaaaatactctcatagtttcaactatactaatgcctctcaaatatatagtttagactctaatttctaatcaaagctttaattcttaatttcgagtggccagaatagagaaatcacataacttatcacattattacaataatgtttacaattcacctgggaattttaaaatgatatatacactaataattatatctaaagcctgtacttaattatgtcatttagaagactgtagacaacaccaagccactccatataatccaccaaaggtacttttccttcctataaaaaatgatcaggaagatttgatcaataattcttttatttttcaaggaggagaatttcttgtttgttgtggctaccatctcaaaatgccttatagtgtctctacttcaacaagaacatccctgtaccaatgattttcaatgtccagattcccagatgttattattcctgacaatgaatctgcatttgtttcagatgcatttaagaaatttgtgaagctagagctcatctaacctgtcatcattactcttcatcaccctcaagcaaatggtcaggctgaaagaatgatgcagaccactaaggaagccataaagtaaactatcagaagaaagtgactgaggagatttgcccagcttttcatcactcaacatatcagtccaagtgggacaacagaagtcagttctcctgaataaaaaaggcagcaacattgcaactgtgcctttgacagttcccatataaagcttagcttagaatttatagacaaaccagaatgtactctgggaatagtactcattcttaattcatttttctagaagaatttgtgttgactagaattttaaatgaaacagaaaggggcatgttcctatttaactaaaatcacggtgtgtgtgttattacaagggctagactgtagatggaactaagtggcataacactaacaagagcaattcagtgttatgttcaggttttttacattcctgctagtattttatttcttttaagttcattatatgccactgtgtacttattttaagttcagatatattatatgacaaagttaaccaagaatattttctttcaccaaaaataagactcaaaccctctttttctgcttaacatcaatcaaatctccaaaaagttaggagaatttggaaaggagtacagaaaagagtgaatgtgtctaccaaatacttctagctttcctttttctggtcacatggtaagattgcccttagcctcccctttggtatcctacatgaacatgggatatactttgaccaattattttaagcaaaagtggtatgtgtcacttctaggtgaaagttcaggcaacctgtgacggattcattacatcatttttccctggtgaagaagcctgagttgagataaagcatcaatcatcttgggtcccaggtttactacaataagtagagcctcttgccaatccctcttgggtatgtatgaagagaacaagaaataaaatttgttatattaagccacttagattttggattactgcagaataacctagactatcttgacttacataaaattaatcaaaataataaaatattaataactgaagtcataaaaagttttatgcaaaaaagttaattttttgcagtattaaattcaaaaatgaaaaccaactaagggtttgacttaattactatctacaactgtaggaacagtgttggttgggttttttttccccctaaaaaggtgtttaccattttgcaaaaggaatatttctgttaaacaaaggaaaccagcatgaaccaatataattttgagttggaagtaagagaaaataaaggaatcttcaagtcatgaaggaagaaggtgaaaccaaggaagggtaaaggatgaagacagtgtggtctccttcctagataactgtaataaggaccatacttctatcactcctggattatttccactggcaaccgttagagaattttagactttagaataaagctgagggatcctcagagggaactgtgcattagcttacggggcctgcaaacggacaaggccagtggctaaattatgtgtacctaggtacacctttcagagaagacatatagctttattcagattctcaaaggggtctctaaccccaaataaggctaagaaccatggttatatattaaccccacttgaaatagggtattataaagcataatctcagttttctacaactgtcttggggataacaaatctgtagtcttactttcactctcaagtcaatgtaggagatggcaagaatttttacttttcccaccttaaactacctattagttttgcagagcaggaaccataacttgaattctaaccaagaaattaatcagagttaactttaagaggtttagagaaaatatcttaaaggggctgggggctctcagttttttaccctatccctaaggtccattcttgtctcccagtaaaaagattaacaacaacaaaaaggttggcttagcctcttacacagtgcttttttaggctttcagaatctaaactttccagactcagtcgttgtagggctcaggcttgttgactgctgtatgcctcaatgtccccaagctcccagagtcttcccactgactactcatggcaaaaaggaaattagagggcaggcttgtctttaaaatttctctttttttcccctccacaattctgtttgtttccattttattattaataccatataaaatagagttatacaatgaatatgtaaagaacacaaactgatgttttcaaaaacttttccaagcatgtcactcaaagacagaaagcaaggttcttaaggcatgattatgttgatcataggctagggaaagaatcagaagcacgagtttcctcccaccaacctattctcccttccctctattttatgaagaaaatagtggccttaaaatttaactgagttctgtttctggatacagtgaaattgcttatggaaaagcagcactctcaccaagaacacaaaatggtaaaaaaacaaaacagacaaaacctaatcttatgtgatgtggtgggaggggactggggtatggtaccagggacttctgggagaattgacaatgttctatttcctgatcaggatggagattacatagatgtgttcactttgcaggaattcatcaaactgtaaacctataatttggtactttatgtaggatatatttcagtaacatatttatctttaaaaaatgctaacttattttagcaggcctagtgaatacctggaaatacatcatttgtaaaatccaagcatatgtacattttctctgagaagcttaacttttagacattctactgcatgtgttcaaatttactcccactgtaattattctctcctggcagttttacataagccttagtgagagatagtctcctttggctggtaagttcatgagcaacacaatcttgcataaagtaatgcccatctgacactgcatttacctttaatatagattatggttatatactttggaaaactgcattgcatgtggtcaaatgtccatctcctcccatccctataactcatttatcagtttcatgatggcagaaaggagattttctatctatccaaaaattacaaaataaatatcctgttctaaattttaagtagacaaaattttgaaacattgcttgcaaactacacttattaatagcattacagcacgtaacaataaatcactttggaaggtaattgaatctcataagtttcaataatttataagaaaatatccagagataatagtaacacatgaaaaagaacaataggaccaacagtctacaaataaaagctagggaacacaaaaatgacacaattatcaaattcaagaatttgaatttctattcacaattgacagaatatataaaggcaactgtaaaaaccacctacaaaaaattaaaatgagaatattagaaaaaatttggtagtgatactgagtaaaggatttctgtaacttgtttaattgtactgagcagcagcagctattacattgattttactcttataaaacaatttataaattttattcttaaaaaacaaaaggacatattagtgctataaaatattaactaacctgcacaatgtgcacatgtaccctaaaacttagagtataataaaaaaaaaaaaaaaaaaaaattaaagaatctctacaaaatatgcttacttatatacctaataaatcaatgagggctaaaataaaagtgtatgtaatttaataagatgaaaaaatacattggctaggttcaggtaagaaactcttagatattttaaaatactacatttaggctattattaaaaagttaaaaaacaacagatactggcaggattgtggaggaaattgactgcttatacgctgttggtggacatgtaaattacttcagccactgtgaaaagtagtttggagatttctcaaagaacttaaaacagaggtaccattcaacctagcaatcccattactgggtatatgcccaaagaatacaaatcattccaccaaaaagacacatgcactcatatgttcatctccacactgttcacaatagcaaagacatgaaacccaccctatcagtggtggtttggataaagaaaatgtggtacaaatacaccatgaaatactatgcagccataaaaaagagcaaaatcatgtcctctgcagcaacatggatgcaactggaggccataatcctaagcaaattaatgctggaacataaaaccaaataccacacgctctcacttgtaagtgggagctaaacaccgagtacacatggacggaaacatgggaacaacagatactgcagactactagaaggggaagggagggaggagagtttgggtgggaaaactacttattggatgctatgctcactatctgggtgacagagtccatactccaaatctcagcatcatacaatatacccatgtaacaaacctgcacatgtgccccctgtatctaaaataaaagttaaaattaaaacaaaacactatacttagttgataacatttaataattaccatcatatgggaatatttacatctattttttcaggcattagtaattcttgccagagtattatctaattggaaatggtaagaatttgtatgagcacggatttgaggtttataacaacattacttttttcagatagattgtaaacatctagacttaattcagaaataagatttcagaggaaatgtagaaattatctaaaaggacaacctgtttttaagaacttctgaagtttctgtttatgtttgaaaaatggatacactaaccacaaatcattgtatcttctttttaaattgggtacagaaagatcctctatttgtcaataatttaaatatcttaattagttttctaaacgttcaaaatccttttagaaaacagttcatcaattacataccacagacactaaatctacagtttttgtgtatgtgtgcatatgttcaccaatttcaattaaaatctatgacaaaattaaagaaattatttttggttttggaagacataaaataactgaggattatggaagtctactatttaaataaatataagtattaaaaactatctatttgacttagttaactagatttctcctgagccacattcaactagaaaagtagcacttaacatataacctgctcctgtcaatgaattcttcataaaattttcaataaatcacagtataacattttagtaataagtatcttaaaatttgaggttcaatgatgtgcataactgtatgctcatagtaacctctgttattcaaaaatatctgttgcttttgggtgatacacaagaaacacgtcataaaatatgacaaaaaagcattgttaacatgacaaaagtattcagtgcacaaggcaaaggcatctactcagagttgctattgatggtttgggtcctagcttcatattacaattacctggggagtttcttaaaaatactgatgctcaggccccatgctcagagattctaaatcacttggcctagagtttccaggacttttgcatactttacaatgctccctggagagttcctaagcaccgtcatggttgggaggctcatgacataacagcttttaagtagctactgtactacatccacagtctacccttactagctatggttaaccctaaacaattccagataaataaataactagatttcagactagttacctttatctggcctcagaagaaagaaaggtgaaatcatacgtattttctattttttaatccttccaacctggataataattccaaatttcccatttacatttttgccttgagtctgcatatttcaaacagagctcatgaccaacaggaaggttgtgaaacaaatttcatgtgttgtgacaaactttaaaacaaacagaatagagatcatcacatgtatcagagatcatcacatgtagtaagagtaagcaggattttgtgaaacttttgtctcagttgaatatacatatatgtgtatgaatacatatgccgagtggtaaaataaaccgtatttttacaatagattgttgggttctcagctgattccagctgcttgtccttttctcactgtctgaaaactgatactcttcgacaatgtcatgaaaagaagtttatttagtcataagcttaatcaagacagtactgaactcataaaaaatcttctgagagaataatcatggcatatatcttgtaaattcagactacagtggggagagtatgcacattaacttataatttctatgccaagcatttttttttggctctttctccaaacattttactaatatcttacggcatacagattggtctcttggtctcccaacttacaggagacattttttggaggttgtatttttaattttttttcaatattgaaaaattttataggcatgagcatttcaataacttcattaaagaagaaattctccaagatttttgttcatgaatattatagtactccaagcttttttttttaattcaaactgttcagtaatagttttcagtttgcaaagttatcaaaaaggatagaatagtttacattagaataaatgtaacattagaataaatgcaacattattgttcatatacatggaaagtatatatttttatttgaataactatcctttcaagaagatcatattacaatgaagataatgttcccacgtactctctgaatagtctgagatttaataaaaatgccatctgccaatgtcacagattacctcccttatctatttcccactaccacccaacacccaggttctggtccaacccagaccactcaagagtgcttctgcttcccttcattcacgatgggcactgtagtcacatcatcatggcatgtggccatgttgggtcactgagattcactgagaggttaatgggtccaatatgccaggatgggaataccccatgaagccaggcattattttccaatatgacatttttcttaaattactttgtatctttccaataagtctctttttacttgatccaattaataggtttctgttcactcattcatttattgagcagttactgtgtgccagacaggtgataataaccaatagggcagtgtagttcctgcctttgtgtcatttactttattacaataaaacttgccctgattaaaacaatttatgttattctcctcccttgaaatggattttaagtcaaggccaatcggctttagtgtttgcagagtaaccaggacagcaatgaccagggcagtgtcatgcacatgaacttggtgaccacttgcacagcagaatgttcctgaaggctctttgtctctatttgcagtagaagtcctaacaaggccaaggacaaaacaatagatggcaaatattcctacactctggagttgctgcaacatctggtaggacttgcaaaggcgcagctattctgaccgttagcttataccccacatacagcctttaaaagaggtcaaagggagacaaaaaatcctagagaggatttctttttagagtcccattggcatgctaagacctaactctttattggattttaatgacagtggagggaaaggcaaatgttttctgactttgctgtatgagtcttgcttgttcaatatggcagttaaactttttaatagactggggagtaatacaatgtagtccaaaaaaaaaaaaaagttcgagtcaagaagcctagtctgcagttggtcaccccttagccatatgtcctgaatatatcattcacttctctgagactcacctgcttcatctctaaaatgggagttgaattagacccatggaacccttcaagtggaaatctccataatttctgacccctattccctgctctatgggtgcatttgggtggtggtaaggaaaggctgctccagcggtagagttttaaaatcccggaacctgcctgagtctccacacttctgtggtctcctccaacatgaagccttcatgatttgacttttcttggaaatcaagacctttggtcatttcgttgttcccatcactgtcattattgaccacagtccctttgttgaagccattcatcatctggctcttctcatttcccctataaaatttttcagtattgaaaaaaaaattaaaaatacaacctccaaaaaatgtctcctgcaagttgggagaccaatctgtatgccgtaagatattagtaaaatatttagagaaagagccaaaaaaaaatctttggcatagaaattataagttaatttgcataccttccccactgcagtctgaatcaaaaagcatggtttttctctacatcctttgtgcttacaaaacccacttcttcaggaaaaaagaaaaataataaaaaaaaatttcttttcaactctcacattttaagtacctgccttagacctaagagtaagtctctaggctagctacaacatccccttaacattcataccctctccagcttgtgaattaacaaaatgacagatattttttcatagttgaacttatttggcttattaggcttctcctattctagagcattacatattttaattccttaatacttttggaaagttgcttcaattaattaagtgatgatgtgtttgttgaaacatgctggtttaaccattgtctactggtctcttctttttaaaagaatgtaagggcaatgagaagagccacttattgtggcattgttcttttaaatactgcctttaaaatgaccttcttttacagttgtaaagtgctaaagaaaatcattttgcaatgctatttcagatattcaggcaaaatcatccctgtagtgataaaagaatatgcccttagaaattcaagatttttcataaaaaatattcaacagaagtcaaagaaataaaaggaaaaaggtgattcgcccttgttgtgtctgaaatggacccatagaagttattgtgatgccttagtaaataaggattatttttagaatggtgtacacatcattatcataacagggcaaaattttttgattcttgcttaatggtcattagcaataatggactctaaatcttcaaatcacaaatttccttcttatgctcctctctaataataaccatcatttttctatttcctacataaatctactattttacatatgaataaatatacatggtgggatgattgattttatgtgtcaatttgactgggtcactgggtgcccagatatttaattaacatcatctggggtatgtgtgtgagggtgtttttggataagagtaacatttgaactggtagactgaggaaagcggttactctcctacatttggatggccctcatccaatcagctgaaggcctgcatagaacataaaggctgaaccttccacaagtaagagaggattcctcctgcctgcctgagctgggaggttggttttttcctgcctttggacatgaactgaaacatttgctccttttgggtatcaagcctgccagctttcagactggaacttataccagcagctctcctgggtctccagcttattggctgcagatcttggaacttctcagtctctgtagctgtgggagtaaattccttaaaataaatctctttctatgtatgcatatatcatataggttctgtcctttgaagaaccctgactaataaacatagaaataaattttcaaatctattaaataagtaaatatgtatctcacatataaacttgagcccatccccctctctggaattccataaaaaataattttcatagcctttaaaatcctctacagttccaaggacctgcccagggcaaggagactgaaactttttatttttaactctttttttcttacaattttattttttaggggtgtatttttaggaggagctaccagcagaactatatcccagcattgctgatactaaggtaatgcccgtttactttcctctgttttgtgtggctcattgcaaccagggactggaggtggtggtggaggagcaggagagtaagtgggggttctggatggtaccaaaatgaccacatacaaagacagcacaacctgctaaggctgcaacctgctaaggctggatgtctggcaacagtggcctctatccacacagtgctcaggatgcaagttgctttttagggacacctttgctgctccctttacctttaaggctgagtgttacatttccagaaagaggtataccctcttcttccatattaaagctaattttaactaagtgacaaacatcactagcataaacataaaactgaataaatgcagcaaagattattatggtctctgtttgaagagacagtgtaactacaacttagcagaacacaatttattgtgacttggggaaaggcagagtatggtttttgcttgggccccacctgggcagggctgactcccagctcctctggttatgttctgcttcccaatatcatcaactactgagaatcccaactatgtaaaacatccctggggaattccactagggtctaggcttttccatgacaggcaggttcttagaaacaagtcaaaactatggtttttgaggggcttcccctccaagccaaatgttttcatctaaataccagcactaactggtgattcagtatctgatgaataatgcttatgtttttatgctcaacttgtaatggactataattgtctacagacaaccacttagcatatctttatctttgcagactggctctgtaaatgtcatatctttgtgaatacttgactcccctatcatttgagtgtctgtgcctattaagttctgtatattgaaaaattctagataatctagaccagttaaagcccccactgaaacactgtgtggagccagacctcatttccttattttccttctagaacaaacaaatgaagcaggtgcaatgatgtccgttccccttctttcatcccaccctgagtcaatggcagcagcaaacccaaagttactgcaccttcattcctgtgataccgattttaatctcactacatttaatttcactacatttctgagacaaagtaacatacatactagcaaaagctgcagactacaagttagcagcctgtagtttaagcttcaattctgacagtaactgtctggctctagtgaaaccatttagtcatttgtttcacattttctcatctgtaaaatgtaatgtgggtcaactctgaatttctctgagagttctaaaagtctacgattcaccaaccacaacttgacaaccagtaatatccaccatgatgcatgagactcaagctaataaaccaattagttaagcaatccccatggcaaaatcagatccagttttggatcacttttttaaaataattccaagaaaccccagtctcctagggaagactaggatgtaatagattctgaaggtcatagagattaaagcaaattatattgtggtactatctgcaatatctggtgggtttttataacctacctagccactagcacagtggcttttagaagacacagtaagtagttacttgttatttgactgaggaacagataaaaagatgatgactctatcatctattagtattcaggaaactatgaaatgaatatacagtgcatccagtgatttgtgcaatgtgtcagccatctgggctttattttcactgtacgccaccgttatttattaaagagtagaaatgattaacacagagacatctggccctgcttatatacccacactgcaagtttttaaaaaaagatatacccaggaaattaacattcatatttggatacaaaagtctggattgaattttgttttttagatttatgtctctaccagtaaggttttacaaaataaactctcttctcaagaatgatgctttgaagaaaggctactaccaaacttagcagttacatatttttaggtttattatataaatataaatatatataaacatatacaaatgtaaaataagttatacacaatcttactgcagaatagtttttctagaagaaatgccctgattggaaccaagaaggtaaaatctctaaatgctttcattttgcataagattagagcctacactgtcagaaaatgattaacactcagacattctcactactgtcaaaatactgcacaaagagagagaatgcaggattgccaggggcattcccagctccctgacgtcaattcagatcaaattcagataacttactatgccagctgcttgatttttccgttttgtgaaaatcctattctctttaaaatgagtttgctatctaaataccatcaaagctactttgaaatattgggaaaagggtttaagcttttttttaatgcttttcacctccctcctcatgacaacaagcttgtagagaatgatcaactccttctgattccttcaattattatcactatcatgatataaaatattttttctggactctatagtttgatgtagagtgaaagacaatctgcactctgttaaaatttatcttgtataggttcatggatatggtttggttagagactttgtaatagatgtggcacctctgggcttctgaaaagaatgtcatctaggaaaccacattatttgattccttggctccaccctcccaactcctgtcctcaccatcctgttgtcttttctctgtggcactatctaatgccacaatagacttcccatggttgctctccagaaatagaagaagcttttggatatttgaaatacataccatcttaactactcctgctctaacagcaacaaacttttcatcttagttgcaattgatgtttttctgtgccttcttgtatgaattctttacaggttaataataacatacaacacttataaaatacttcccatgtgccctattgcatgctttatacatgttttatttcagttaactatcacaatacatttattaaatagacattattattatccccattttacaggtgaagaaatgtagacccatagctgttaaatgactcgccaatgtcatacaacatgcaaggagtggagctgaggtttaaagatgtactcaggttaatatgttcttaaccaccagtgtacattacttccctttctgagcatacaaagtacataggagacatggcctatggagcgttaatgcattaaatatacaatgccctgttaaagtgactgaaaaatactaggtttttattaagcatttattgtaggtcaatacttgacatgcttgtattattgtgggaagtaaaatgaaaatcataaaatgttttctccctgcatcaagaacttaactttaagaatacaattttattttgcaaaaatagttaataggccttcttgttttagtttccagcctaagagttgtctatcaggaatgcatagaagtagaagataataggaatcatatgtccatcatttaaatatgtaagatcatctttttaacacctgtgatctaaactgaaacaagcaaacaaaatcctagtcagtatggagatgggggagaaacaaatttctagattgaaaacagaaggcaaaggagcgtctaagaagagatgtaacaatgatgctttttcaggataagaaatgcttcatgagaaggtatttcaagcatcctgggaaaggtgagcgaaacttctactgggagtgaaaggcaggggaggaatttcaagttgataggacattaactgcagagaaatagaaatagctaaagaaataagcatttgaggtttttttcgtgttcagttaagaggaaataagtaggtaaaacttgaaaatactgactgaaagccaagaaccagactcacagcacaagggacttgctgagtgaccttggacaagctacttaaattcagcttcctcatgggtcagacgatgctatcagccctatcattttcctagttagttattagtctatttgattaaatgcacagtggttccagaaagcatttaaggcagtttataaaaatacataaactaagatagcactaataaaaagtaatcaggaaggagagcaacacaaaaaacatgccggaaaggaggctaaaacaaaaaggcacatcatgaagacttagtccctggctatgaatttgactctgagtttcaaagcaacctctgaattagtgaaatctggtgagttacagacgttaggaggagaaatagctcccttctagcactgaaagcatccagtgagatcccgcatgtaacaaatgcttatttccttctcattcctcttttccatgaaatggcaggaagtgccagatccctttagagagctaccacaagtgactgtctgccatagtatttcttccctgccttcccctctgcacatcagacacacagtgtgtacacagagacacagagacaccacactcacaccccacactgcagggagcattccagagctgactactaaggcttggggtctaggtgctccctagttccctcagttttcaccccggtcactatttacccgtggagacagacatcccagataaatcttctgacatcatcaagagccaaaaaaaaaaaaaaaaaaaaaatgtgtaactgttgaagcaatgtaaaatataatgaattttaaagtgttgccatttctaaggcctgtaggccactcaggctgtagcttcgtttccttttttatctcacattttcatgctttaccagtgccaaacaatttgagctattcagctgaagcaagccgagaaagaaatagaggagagatgtgcatcttgtaagatttggaatacagctatttaatctatcagaaattagtttggagtagataagctgtttaaatacgcatttgaaataccattaatagggacacttctctttttctctttgctctgtattgtggttcttttaataaaattggcaatggtgatatcagtgtgtgcatagctgtgcacactgtgcttagcaaacagttacttaaagccaggatattcatttttatgaaaaagaactagatatatattcaatagaacaataaacctttcaaaaaatataaccactagagataatcttctttttttttttttgagggggggatcttcagagagctttccaagtacagttggaatatttcacaatttcaggagacttgtatgcatctaaatacaaaaattgaatgtattttcatggtaaaatattgttggatgtattaggattggcggtttagctggtaagtaaaattttagggagagtgggagcaaggcagacgcataaaacatctgtgctttccaactgagatgagtcaaataaggagaaaaatgacaaagttctgtggtaaatgagctttgaagtgttctccagttcaagccaatttttaaattttaatattaataaggattgttggccaggcgtgacggctcatgcctgtaatcccagcactttgggaggctgaggagggcggatcacgcggtcaagagatagagaccatcctggacaatatggtgaaaccccatctctactaaaaatacaaaaattagctgagtgtggtagtactcaggaggctgaggcaggagaatcgcttgaaccctggaggcagaggttgcagtgagccaagatcacaccactgcactctagcctggcgacagagtgagactccatctcaaaaaaaaaaaacaaaaaaaacaaaaaaaaacattgttgctgtggtccctctgtaatactgctctcttcctgaggcttctacttgcttgagctcttttgtttcttacaaaagcacaagcatctagaagacagtaattagtttctttcttgatatatcagaattattccctaattaaatgagatttaaggtgataaatggaattactttgtcttttagacctccatatttctctggagaattaccttacaaggtttaaaatatgtatattaaggaagcccacttggaaaatacagaattgtttggctatttaaatgaaagcagatacatggtgtttcagtattcttattgtctttatggcttcaatgctctcaacatttgaattaataagatttggggtgccttagctgcatggaagaatccttatttgtttccttgtgcccacattaaaaagaactcaaaatgactcattaaggaaaaaagaaacttgcaatgaaagaactgttgtgtgggtgagtcccaagggagacttgacaatatcatgcaattttcagttttctccctatttctttatattttaataacctaccagttttctatagagcacatctttctccatgccgttgttttcttacacatatagtaatgataatagttatctaagatttcaactttaaaaaagcatgtgtttaataagatctctggtattcctctagagatagtaaaattataatatcagcactgccttaataacaacattttaattgtttattacttccagtatagtaaaaatatcatttcgcaaatatttgcttagctctttggactctctcatatggctacaaagatgagatacccttacaattatctcattttacaaactgattttctttttctttcttctaaagcaactgtggagtaagtatcctcttaaaataaatttcatatgctaagtgattttctaaaaagtaggtggttgaacttaaacaaaaatattttaaaatatttaatatattggctgtttctcaaccctaccactgcatgcaaaatagcttttcttttcaggtgaccatagcaaataagtactaagtagcttctttatactaattgctcagtcaaatgctttcatatgctttcatcaaatgcttttatctcattttttaagagtcttatgagataaatattatgatctccactttgaagatgaagctggagacataaataacagctatagaaaagaaagaaaaccaactaaaaacagtttctgaacttaaaaataatccatgcaggtaattcatgttcatacacataatgtaaaccacttagaaatgtagtatttctttatatgttacatgcctcatttgtcatctttgtgcatcccttcagacatctgcatttgtgtactgcaatgactaataatagtaaattaaagtaaaataaactattataaccaaatttatcttgttcctttgatgtggtacagaaaataattaaacaggtaaagatataatacatttttatgtgccagaatcaattggcaactgacgtggtaccacgaaagtaaaaggctcatttctcccactatagagaaactctaggcaatgtatctctatccagattaagtcttcagggagtacagaggaagtatacatagtggagggaaagaacatgagttccacgatccacgtatagacgatcaaatcttagccctacttactagcagagtgagattggccaagattatttctctctgaacctacctttcctcagcttgaacacatatggcctaacatatatttcaagcatatctgcaatatttatatttaaaatgatatgaagcaaactttacctataatgacattagttactcttgggagatgattatgtatgtgattttatattgccctgtgcacttttctctatgtttaaaacatctcattattctttttaaaaagaataaaatgagtaagtaaataacataaagttgataatagctacttccaggggagggttcagataaactgaaatcagataccatatataaagcagatactgcaaagtaggtaactctcaatttttagctcccttctttcttgttttcttggcaatgcaccattaccttctacctcatcaatttcattcatgagattgagcagtgactttccagtaaagcaagttatcatatttgatgtcagtggtgattgatacaatgctaattaagtagctacatcacaggaaaaccacataacattgaaagcatatttcatttaaacattttggaaagctttctctgtagtctcattgtgaatagtaactgatgccttggttatgcaaaattcaagtattttcctcagtatttctccagaaagatgatataaaaattcaccatactttcaatgtcactatttaactatatgtatattcacacagattcaaaagaatcatgaataccttatttcttacttaatctaactatctaataacaataaatgttatagttaaatataatgtataagatatagaaattgctctttatcgctatactcttcctggtgagatagcagggataatggataaattttaggttgcccaggcaagaagcagataggagaaataagaaaaagctgtagctttatttactaaagttaggatgttttgctcaaatatgcaacccagatacccattcaggattgaggcattcattcccccagcagctgggagtcttctcagctaagtctctctcctggaattgcctttatccaaagagagagaaatctactgcacacaggtgttgatcttaagagaaccccacccccaaacaaatttcttgggcctaaatctctgcctccaagtctgttttctagagaatctggcttacggcatgttgcatcacctctttcttccttgaatgcccatgaaaaccttgaatacaagtatccatgatcctgaacatggtttggttttctaaaaaaatttactgggactatcccatctgtacattcactgacaataaatgatgtagaacattcactagagaatttattcaagattacctacttatattaatccagaaataatataagaaatgctgtctgattagggagagtgaggttgctcacacttggcacctgacccaatttctacaacattttacttgtgccagtacagacctatgttgttctttttgaagagttaagtgtatatacataggaacattgctcatttctatttactcagaaaatctaattttcctccaatgcactaaaaacaaacaggaggcccagtgagattaaaccctcaaattagtgtgagaatacctggtttcttttttactgccctcaactgaatttctcatcacctggagctaattttccagggtacatgtgctgtggaaataataccagggaagtttattagtgtagggaactgataggtctattatatgtttaggctgtgtccccacccaaatctcatcttggattgtagctcccacaattcccatgtgtcctgggaggcaatcgaattatggggtgggtctttctcgtgctgttctcatgatagtgaataagtctcacaagatctgatggttttataaagaggagttcccctgcacaagctctctctttttgcctgccaccatccatataagacgcgacttgctcctccttgccttttgccatgattgtgaggtctccccagccatgtggaactgagtcccttaaacctctttttcttcctagtgtcaagggtgtctttatcagcagtgtgaaaatggactaatatgatctatatggtcaattcagtgagaggtgtccattggctaaaattgtttatatacttttaaaggcttaaaaaaattaattgtcagattggtaccaaactctgagtttttttattgcaatattttaggcattttggcaaaatatacactggggacccagaaaaaagactattctaaaaagaatgaaaacctcttattttgcaggtggccaaaatcctttgttaagattcaaaaatccgtgtactaaagcagttcataacacatctctgcagaaacatgatcagatacagcttctcaatgtatatacgtaaatgccttgcaataaggcaaaatggttaagaatgtcattttaaaaaagcatgttctaaacactggaatcgagtttactatttggtaaacagttcaatatactgtaataaactagctcacaatgaaccaacaaattaatgtaaagttgttaaagcacagtaagttctcatttttcccatctactctgtttctcaagttaaactgcctattaaataaccagaatctcatccagttatattcataaatacaagttaaatacatttttctctaacaaccagcaactcagttttagagaccaaatgataggtgtcctggtgatttaaatacataattacaatgttttaatgtataggtaaattactaagatcagaaactgaatgaataacgagagagatgtggcaggatattttaagatccatcataataggtaggaagagtgattctatttatttgtgaaaatgcattactgtttaagttcgattcatgaagctatacaaaccccaaatgtcacagcattatgggaaaaggtggaacatacgtctgagcataaaacagtgatctaatcacatctgaccacattacgaaatagtttttttccaagttataataaggattgcttcaaaaaataaatggcttactataaatgcatgataataagataaaaacaaaatgagctttggaaacttggctttgaccctagtaaccccaattaaaattagagaaatacttcctttgacagtttatgctgtgatatcaaaaatacaatgcaactcagggagacagaatgtaatgctttgggtgttgctacctggtgagttcagaccactggcaggaaggaaaatgtcatctaagctgctgaaattgtttgtactccacttgtgaatttgcaatgtgtcagatatgtaataaaggcactttctagaagtcgtatagccattaaacttcctaggcattgccatgttagtataatgatggattgcaggtctcaaaaataaatactagcaagactagaattaggatacaaattcagctcctgaacatctgttagggaaagtcagtgtcctaatttgacatgaaaattagatctgtcaacctaagcaaacaaaacaaaacaaaacaaacaaacaaacaaaaaacacctagaaatttattttctggtctacatcagttctcacaaaagtgagacatcaggagaaagttgaactgttagtcataactttcatttattttatatgcccaaacttttgcaaaaattttccttgtgattttaattaattattgcaaagaaatgttactaaggttgcacagtcttttaaactactattaactatccctaatctttctctttcaaaaaaccaagaaaattctaaatgtctagcaatagacctgaggcacttgcattaagactttgaaacaatcccaccagcaacgtaccttccccgtaaacatgcccctcaaaataatactcagtgattggtgcggactacaagctgagcccaaaccttattcctcacttggagtgttggaataaatggatgtgttctatacatttctaagaaaaaaagcaagaaaagaaaaagctagtttttaacacaggctcctgtattcaaatccccttcaagttaccccctacaattcccacctaaggctgttattttcatcaatatgctctttctaccttatccagcccagtttggccttgacttccccaccagtttcctccctaggaatcttccttgagtcttgtcctgcctttatgatattgtaagcaaactcacaaatatccttgatcacttctggatataacttgctcagctccttgaccacactgaagtcgggctttctcctgatggcacactcttccaaaatgtttactatcagaagtagtctccccacttgcatgcttctcttagtccattagctcacgtctgctcttcaacaaggttttttctttgcaagtccatcatatctacttactccattctctttgtgtctctcatttattaccccctggccctgtttctaagtttcttagtgaaattatcatcaaatttcaacaagcctcatcatcaatcctcaatctccatgtctccattccattttcatccttcataaatagagacatgaaagggatcaagatggctgagcagaagcaggtagtgtgtggctccccaacagagaaacgccagaatagtaagtggacaccttctgagcagatagtctaggagagaatgcttggatgcgatagagaagagacataaagcattagaagactgcaggggcaggagagttcccgaagccaggtttcttctgggtggcaagacatgcagctaggggcagctttgagacctggaaccagtctgcgtgtgttgctacgaaatgagaaaggttcccttgtcccccttgcaaggtgtgcaactggagaagtggctcgcttcttcagtgccctgctgctcgtacctctaggggagcatgcaggttgtgggggtcgatcccacggcagcatctaggggtggatgtttacagctcccaaagccccagtgggcatgtgctaccatgggctctttcagttttgccgtctataggcagcttgtgttaaccagctcaattagaccctccaccttatcacaaggacgagggctttctgtatcccgggttcttgccttggcgtgagggaagaattgaatcacacctgggcttggagaatgagtacaaggttttactgagtggaagtagctatcagcagatgggggagccagaagggagatggtttccccctggagtccagccgctcagcagcccgggctctcctatgactgccacgaccaaactccgcgtcattcctctgctggacggcctgccaggtggcagcatctgttggtgtgctcttccaccagcgtgctcccctcgatgtcctctccactttcagctgcttgtgtctctacccgctagggtcttggggtttttataggcacaggatggtagggggcatggtaggctaggttggtcttgggaaatgcaacatttgggcccaaaggctggagtgcctgtcctcacctaggtccgtgggcacaggcctgggggtggagccctcgccagggactcacccttctttacccagcacttcccagcatcccttacatatcaactactgggttccccagtcggcttccttgttcagttgggggacagtaacccaccagctctgaaaagtggtaagggaagggacccactcccctagaaatctagccctcggttcagtcggcccctaagggagggggatgtagccggctaaagcccctcttgggtcaaaggttgggtcaaaggaaacaggagcactgcgctagccactgaagggggcgccaccaaagccagggaatggttgtcgagaaggggtcatcgctcacctctctcatccctcttcagtgtactgttgcggactcgaaggtggctctccccagcggaaccgagagagtgtgggctgaaagagaccacttttggggcttctccagcaattccactcccactgaaggcaaacgcgctgaaggagggcactttgcagacttttccattgcttctgcccttgcccctaccttctggcgctcactcttaagtgccacctactgggctgcagcctgaattacactacaaaacaaaattacatcactacaagaagcaacgtctcagccaccgcacaaacttatctgcaaccaaggaacccatacagagccttggcgccctgaaagcactcagaaatgaagctgatccacccatacacattttacaccacagtcatacccacaagggaaaaaagaatttaaaatcaacaagctccatccaaacaatagcaaattcaaaaaagaaaagaaaaaagcatcagctctctcagatgagaaggaaccagcacaagaactctggcaatacaaaatgtcagagtgttttaccacctccagagaatctcactagctcccaagcaatgaaccctaaccagaatgaaatgtctgaaatgacagatatagaattcagaatctagatggcaaagaaactcaatgagatccaagagaaagttgaaatccaacacaaagaagccagaaaaatgatccaagatttgaaagacaacatagctatattaagaaagaaccaaacacaacttctggaattgaaaaattaactatgggaatttcaaaatacagttggaagccttaacaacagactataccaagcagaagaatgaatttcagggctcgaagactagctttctgaatcaacccaggcaggcaaaaataaagaaaaaaataattttaaacaattaataaaaccttcaataaatatggggttatgtaaagtgacattggcatttctgagataagagaaactaagcaacttggaacacatatttgaggatataattcagggaaatttcctcaatcttgccagagaagtcaacatgcacatacaagaaatccagagaattcctggaagaatactatataatatgaccatcttcaaggcacacaatcatcagactatccaaggtcaacgtgaaagaaaaaaacttaacggcagctagagaaaacagtcatatcatctataaagggaaacccatcagactaacagcaggcttctcagcagaaaccatacaagccagaagagattgggggactatttttagcatttttaaagaaaaaaaatgccaaccaataatttcatatcccaccaactatacttcataaatgaaagagaaataaattctttctcagataagcaattgctaaaagaatccatcaccaccacactagacctacaagagatacttaagagagttctaaacatgaaaacaaaaggaaaggatgatccttgttaccatgaaagcacatgcaagcagatagcccacaggccctaagcagtgactgaatcaatactacaaagcaaccagataataacactatggcaagaataaaacctcacatatcaatattaacttttgcatagtcaaaattaatattgatatgtgaggttttattcttgccatagtgttttaacataaaatattaactttggccatgcaaagttaatattgatatgtaaggttttattcctgtcatagtgttttaacactccatttaaaaggcaaaaagtggcaaattagactaaaaacaagtctaacttcaagatacccatttcacttgtaatggcacccataggctaggctgcaagtaaatggatagagaaagatctatcatgcaaataggaaacaaaaaaagaacaaggatcactattctaatatcagaaaaaatagacattaaacaacaacagtaaaaaaggaccaagaaaggcattacataatgataaagtgttcaattcaataagaagacttaactatcctaaatatatatatgttcaacattggaggatacatatttataaaataattgcttatagacctatgaaaagactttcatggccacccaataatagtggggaacttcagcacacgagtgaaagcaatagacaggcaaaaaactaacaaaaaattttgtatttaataaatttgatagttggccaattggacctaatagacatctatagaatactccacccaacaactacagaatatgcattcttctcatctgcacatgatatatattccaagattgaacacatagtcataaagcaagtcttaatacatttcaaaaaatcagaatcataccaagcatcttctcagaccacagtggaaaaaaaacagaaatcaacagcaagaggaattcttaaaaccacacaaatacaggaaactaatcaacttgtttctgaatgactctaaaataaacaaaaaattaaggcagaagtcaaactgttatttgaaacaaacaaaaatagagatacaacataccaaaacctctagagtacagcaatggcagcgttaagaggaaagtttctagcactgaatgtctacatcaagaagatacatctgaaattaacaacctaaaatcgcacctaaaaaaaaaaaaaaaacagaaaaacaagaacaaaactaaacctagagctagcagaaaaaaaagaaataactaaaatcagaacagaattaaatgaaattgagacccataacaactatacaaaggatatacaaaatgagaagtttgttcttggaaaggataaaaaaagattgatatactgctagctagattaacaagaaaagagagaagatctgaatatgcacaatcagaaatgacaaaagtgacatcacaaccaatcccatagaaacataaaagatcctcagagactactatgtacatctctatgcacaaaaactagaaaacctagaggagatgcataaatttctggacacacacaacctcccaagattaaaccaggaagaaactgaaatcctgaacagaccaataacaagtaatgaaattgaatcagtaataaaaaacctaatgtccaaaaatagccctgaaccaaatggattcacagctgaattctaccagacatacaaataagagctgatacagatactactgaaagtattcaaaaaaaaaaaaaaatcaaggaggaggaactcctaattcaaaaccagtatctttctgataccaaaatctggcaaagacacaacaacaaaaaccctacatgccaatatctctctgatgaacagatgcaaaagtcctccacaaaatattagcaaaccacactcaaccaatgagatactatctcacaccactcagaatggctagtatattaaaaaaatcaaaaagtaacagatgttggtgagactgtggagaaaagggaacgcttgcacactgttggcaggaatgcaaattagttcagccactgtggaaaacagtttggagatttctcaagaactaataatagaaccaccatttgaccctgcaatctcactgctgagtgtatacccaaaggaaaataaaccattctaccaaaaagacacctgcacttatatgtgaatcacagcactattcacaagagcaatgacatggaatcaacccatatgcccaccaatggtgggctggataaagaaaatgtgctacatatataccaggaaatactatacagccataaaaagatgaaatcatgttccttgcagcaacatggatggaactggaggccattattctcagtgaattgaaacagaaacagaaaaccaaataccacatgttcttacttataagtgggagctaaacactggaggcaacacggacacaaatatggaaacactgaacaactgaggattccaaaagggtgggaggagggaggtgagcaagtgttgaaaaactccctatggtcctatgtcactacgtgggcagtgggatcattacaagcccaaacctcagcttcacgcaatttacccatgtaacaagcctgcacgtgtactccctgaatctaaaataaaaataaaataagaaaatacaataaagagatccctctactaccctcacaggactggccattgtatcatttcttttggtacagttcataaactctaaccctttatttcttctttttttctccccttctgatcttctctctttccacattttcactttcagtgctgtatccctttctcatttttccatattatagcctcacctgctagaccaactaatttttttcttatttaaattccaaaattgaattttctaatcagattcacattatcacttttgaatctcttatacttggtcttcagaagtcctgaatgtgaaatccaaaccctctctccattcattgtattctttttaacaataacaaaattatatctttgaatacttgttagagatatattcctcagtcagtctgccttccgattttcattacaatttatcatgtagtcatttcttagtttttagttgttgtgtagcctaatctgtcagctgttttctcccaataaaacaattcaagagcatatcctttatctgtgctgggatatggagattacataatacatttggggttcagatttgtttacttcaacaaatattaagcatgactacactaggtagagtagatatattaaagaacagctcctgaccttaaggagcttgcaacttttggagaaaaacaaagacatgcacaaataatttggatattacacagcaaatacagcgacagacatgtatcagcatatgagagcacagaggaatgtattaaatacatcttggaaggcaggaaaatgaggaaatgcatccagaggcagaagaaagaggcagctggggaggaaagaggaaaatagactttccagacagaaaaaacccagcagttgtgtacaataatatgatgaagatctaaactagtgtagtcaattgataaaaaggaaaaagcttaaaaaatattcagaatataaaatcagcacagtatggtgatggtgactgattggagacactacctaactacactggggaaagactggcacagcaagagaacagggaagcgatgtgcattcatattgataggctgaggctgagctgctaattggaatgtcaagtggaatagatagtagaatgtctaaatttaatgggtaaatttatggatgaagataaaacctgaagatgcatgagaatgtttatgatagctaacattttgctcttgcttgcagtttccccaggaatttttacagtgcctttggagactcagagaaactgtcttgttctattaattcctttgcctcctttcactagtgttctccactaaattataatctccctaaagattcatgccatggtttctttacctttatatccctcctgtctcctagcatagtgcattactcttagaagagagtaagcactcagtaaagtttattattgaaaggtcctcaatagcatgaacatataactaataggtagattaaacttatgtggaacacctgtggtcaacaaaatacctatatgcagatgttccattaacagataagtctttctgagatgattaaagcaaagagaaagaggtctgacatttatgacatgactttcagatttaaagcactcaaatagttgtttaaaagaacagatctctgtttaattacctccaaccaatggaggtattagatcacattcagaaagctttaaacatggtgtctgagcaataggaatttcttccatattcttctacccaattaaaacttggggtgaatactgaaaagatggagatatatctaatgaaacataaatttaaaaaaagacattttattcactttgggacaagatcaaaaagacttagataattattttaattcaattaggaaaattgaaagcaccattattttccactcagataatttctttattccttaaggtagtgtgtgtgtgtgtgtgtgtgtgtgtgtgtgtgtgtgtgtgtgtgtgtagtttgttttatctctttttttgtaaaactctccttagggaatattgcaagaattgtttttcttgatataaaaattaaagcatggagaaattccagtgaaaaggaaaggacaaactaacatctgattccacactatttctaattctcaatcacaatatcttgataggatagaggtgttttgtaggagattagaaggctttttttttttttttgctgaaattgcttttacttgatttcttttgaagagttgatctcaatttttaaaattgtcatttaaatgctaagttctgtattaggagaaaataatctagaagaatctaaagacaagtgtatagccttaggtaaagcatcagaaagcataatttaaagagggcttgctgtggaagacccttcaattcagtattattcagagtagcaaaaaaggttaggctacaatattcctgagtgttaatttcatgctctggagctcttaggtaattttacagagtatggcaaagtgataaaagttcaggaggtccatcatctataactacttctgtagaaatataggggaaactgtaattacatcctcagaaacttatgctttcaagtaaaaggcaaataaaattagtaaaataacttcatgcaactcatggctatccagaggcagctttattcaatggaagtgctctcactgctggttcacagcaaaggttcccatgacaaccaagaatacacagtacagtggtgatgctgtttgcccagggatatcctgtcattaatataaataagtagataacgatatctagtctataggtattatgatccacagctgtctataaatgacaactgcagagtagaatggaatgctcagaactgagtttattccaagttcaattaaagttttatttccttactttctaaaaacatcaaagtatatgcttctaaattattctactgtgtttcactataattttcaagtttggtttcatcctggattatgacctttcagtgagctgggacagtaatgtggccccaggtatggtgagtaagcccacctgaaatagaaggtggtttactttcttgatatgaacaaaggctattttggagttggaactctccagaacagttaaaatgcatttatatctaaaggttcttaggtgtaaaggaacatacatatgattttaagcatatttctctactagaagtcttataatatttcttatctgttattctgtattcccatgtttcctgaaatactgtgaacttattaagacaagaacaaaatgtcatttacttttatatattgggtctaggatgagttggtttcttttatatattggggtctaggattacttgatttcttttgaagaatccttgtagaatgaaccaaaagataacagataaaaatatgcaatcaataaatgtaatagcatgtgctaaatgtcatgtgtaccagaattaacacttggcctatgagagatacagagtaatatagggcccatttgaatcctaacactgatttgtcatcctgtttatttaagaaagttacatactatagtatttcataatatagttgaacaaagtatctgttatatacatatgcacattaagccacaattcattttgcatttgtaagaaattcaatattattttgagtaatttgaaggaaacacaattcttacaatttgcataactgaggttcaaaaggaaagtccaccatctcaacccagttaaatttggctaactagtatgtaccaatcaatataaacacgtgctttaaaaaagttaccctagttctcattcctaggaaacatcagctgtgtagcaccgggattcatttctgttctcatacaatttaatttctgtaataaaaaatctatgtccattttttgatgtgtcattgctgatagctttaaagtgttatacctctctcttcccctctgtcctacatttgggaaaactgttaagaaagcccatgtgttctctcctttggtgatggtgggaaattcaaaccacaccagagtccacccacacaaaactctcagcatggcctcacccactaaaagtcataaaatctcaaaccagtcattttccccctgctctctcaagctacttcagaccttcttgggaggcctgctctgctctccccagaaaaacctcataattttataagtaatacatactttcatactttcttggtaggggtatatgtgtgtgtgtgtgtgtgtgtgtgtgtgtgtgtgtgtgcgtgcgcgtgtgtttgtgtatgtgtgtgtgtgaaagtgagagagagagaagtgtagggctgctcattagtcttaacatttgaaccatattttgggtggaggcttatctgaatccacacaatggatacaacagtttcatcttctagatcttggctatttggttctcctcttctgctcctttctttgggagggaagtaaaaagctaaaatatgcattcccaggttatgcatagaagctaacctaagggaactgcagctttaatacagcaaaaagaacccagaggagagtacagaactgatgttattattagcagaagttgaaaacattcacctgcctaattctgagttggctctggcatcaacagtctttctagaatttgttcaaacagcattattagcagagggtgctgagaagagcagattaccagattactctttttatgcctacattagattggcctcttgcagtgcatcaatataagggtatgtggtatcatttccaagatgaatgttaaggaaattcacacggacaggggaaagcaggttttctacacttaaatagcacattctcaagagggaaaatgtcaacgtatggcttattcatagcacaatagctgtttaaactacagcttagaatctactatgtgccaagcactgtgctaagcattttacattttgcatatatcattattagtgccattttactattggaaaccaaaaacagatccagcagttgtcagagatagaatttcaactcagacttacctcatattcaatgtctatattctaatgaactcattctaagacttcagatttacgttgttaagactatgaagctttttgcttcctgataatctctgaatgtctaataggcctttatagctggcaagcttaggaaagaagcacatttttttttctgctggaatgtagggagatatctgtcatagctcatagatgaaatatataaaaacactacatggtatccattattcatttcagctccattgccctaaagaaacataacaccatgaatttagatgtagcaagacaatggaataaatgcttttaattttttttcaataattatgtcaaaatagatattctgggaaccgtgagaaagtagaaagtgtagaagtcatgttgttgacttcaacatgcttacaatatacctaacatatggctcagtagtttgtctagttgttaataatttgaaacattgatttgctaaattaatataaatggtttcacattacaagtaaggtaagtattttaaaatactaacttttcaagacttcattttttagaggagtgagattcacagtgaaattatgaaggtatacagatttcccatatgtaacatactagttttcaagcattaattttaataattcttatatcctgagttagcatttaaatttattttatacccttagtctttggcaaaaaaaatgcttctgcttaaaatagcttattggctaagaatccatcattttaaagaaaattatgcataatcaacaggtatatagtttaaatagaaaacagcagggggagctcaaagacaggttggacaaattaaaagttgacttcaagagtactgaaaaattattttaataaaaatttgaagagaagaaggaatatactgttaaattatgagatgatattttatacaataatttccagcaaaatagctagctaaatggaggaatagtttcccatacagaacacttcaaaagtccagaaaaaaaaattaatgcacagaatcactagacatcagtgaagtgaaaattaaaattacaatgaaataacactacatattactcaactagaatggttaaaatgaaaaagataatacgaagtgttgacaagaatgtggagctcttagaaaatagagaatattggttggaatctaaattgaagaagctacttgagaaaactgtctgtcagtcttcaaaaaatgcatgcctcataatcaagcaattccacttctggctatatacccatcagaaatatatatgcattatacaaaaagatgtatacagtaatgttcatagcagcatgatttgtaatagtttcaaataaaaataaaacaaatatttaccaataataaaatgggccaggcacagtggctcacacctgtaatcccagcactttggcagactgaggcaggtggatcatttgagatgaggagttcgtgaccagcccggccaaaatggcaaaaccccatctctactaaaaatacaaaaattagccgtgtgtagtggcaggtgcctgtagacccaactacttaggaggctgaggcaggagaattgcttgaaccctggaggcagaggctgcagtgagacgagttcgtgccactgcactccagcctgggcaaagcagtggaactctttctcaaacaaaacaaaacaaaacaaaacaaaacaataaaatgaataaataatttataacatatttgtatgaagatgaaaatgaactacaactacatatataaagacaaatgttcctttaggcccaggagtttgagtctagcctgggcaacaaagcgagacccagtctatacaaaaaaataaaataaaattagccaggtgtggtgtcatatgtctgtagtcctagctacttgggaggctgaggcaggaggactgcttgagcccaggagtttgaggctgcaatgagttatgactatggtactgtactacagcctgggtgacagagcaataccctgtctcaaaaaaaaaaaaaaaaaaagaaaagaaaagaaaaaagaaagataacttttccaaatacagtgttgaggaaaagaagctagagaacaaagaacacactctctttggtaaataatatgaatattatcttagaaatcacaatagtagttactctggggtgggggcagaatctgaaaggtacacaaatgggggcttctacagcttagcaatatactgcctattaatctaattgctgcttacatgggtatgttatcttcatggaaatttaccacattttacatttaggtttgtgtgctttttcctcttatggtataattcaacaaaatttgctctaaaattatactggatgattgctttaaatcattaaattaaaagtttttgaggcttgaaattaagaaagcttggtcccacagggataactaagtactagaattgttttttgctttgtttgtttttttgtttttttcctgaaggcatttaccaattctttgggttccagggcaagaatctaaacaaggggcctaaacagagaaagaactcacattcagacttcacagaaagtcttatacccaaaagtcaatacctataactaggcatgctacaatctttcatgcagaacaagacttgtcttggtttcaggcagcatatttaaaacaaatatttctttcaaaaatttctaatcacaagtgtatacttgcgatatgtaatatggcattggatatttgcgtggcccaaaagttgaacatttcatttaaagtaaatctatagttagcagacatgcagttacttaaattataagcaaatcctctttcgaaaaatacactttcaacacagataatttccagagataaaatactaaagagtatgagctcacatatgtaaaaaaatatagaaaatgcataaaaaaaataaacttgcctgagagacaatcagtggaataaactgcacaggtagaccaacaagattacagatattggaactatcaaggaactaaaataaaaaaaaatatttaagctgtttaaagaaatgataaaaaatttagtaaatgagcaaaagacaataaaaatcaacacacatatttagaataaagaccaatagaacttctaaaattgaatgtctaataactgaaattagaaactcaacaaacaggtgaaacaacaaattagactctactgaaggttgaattagtgagccagaaaacatatatgaatgaaacattcagaatgcagtagaaaaagaagtggaaaatatgaaagcaaggttaagataggtgaatgacagagtggggccaacataagtcttactagggttgggatagattaaaaggaatggcaacgaggcaatatttgaaacaataatagctaagaattttccaaaataaataaaagacaccaacactcatatttaggaataccaatacattttaagtaaacttttgaaaaactcaacttctggattcattagagtgaaattgcacaacaacaaagataaaaataagaatttcaaagcacccaaaaagaaaaaagtaacactggtcagactgaaaagtgatttctcaaaagacaaggtagtatcgtatttaaagaggtgaagagaagtagttgtcaacccagtaatgcatacacaacaaaactaccttccaagtctaagcacaaaataagatagtaagaaaaccacacatgaagagaattccctactattggagagtcactagagaaacttctaaaagacatttttaaataaaaaggatggtctcagatgcaaaaaaaaaaaaaatgctgagcaaagaaaatggaaaatgtgttagaaaatgttcaccaaagatgacttactacaactataataataatgataatgtctacaatgtaatacaaatatgaagagaacaaaaatctattcttttgtattttctcaggaggacagtaaaagggtaaagatattatttaacttcagccttaagttacatatttggaaaattttttagggttattattaaaataatagaattagagtttaaaacttacaaactagaaggaaaaatacaatgagaaaagggaggaaatcactttgatctaaaataatgccagaaaagacgtgaaaagaaaacaaacattagaaagcaggataaataggaagcctaaattaatatttttgaatattataattatattataaactttataattttatattaagttataaatatataaaatataggtttatattataaactttataaattatataaacttatatataattatacttttgaatataattatattttttgaatattataattataattaatccagtgttcatgaattaactaatattttcagtttagtttcaacaatgtcaaagaataggtactatacaaatatctcttctgttaaagatgaacaaaattagaaattaataacaatgtatttatttaaaaactcattcctttggaaaacatttaaaaagtacttctaaataacacttgagtgagagaagaaatcaaagggatttataaaatacttaaaacttaataataaatatattatgcatcaaatatatgggattgtcactaaagcaatagaattaaatcactgtattagaaataaaggctaaaactcaatgcacaaagcaacttacttagaaaaaataggaaaataaacacaaaaaagtaaaggaaaataataattataaaaacaaatactaataagagaaaatacagtaatagaaattcaaaaacaaacatgaatatactaattaagtagtctggcaatttgacacaaacgagatacagaaatagaggaaaagagaaaacagcaacaaaaaaattttaaagagaaaagagaagaatgggcatagtataagagacagaggtagagttccagataggtaggtaggtagctagctagttaggtagacagaaacaaaggtagagaacatcttagtagagatagacagacatagataaaaaatagtaaaaatttaaaggaggcatgacttacctggaaaaatatagagacagaagatgtaaatgaaagaactatttcccaggtatatggaaacagcaggaaaatgtaatgcatcttggagaaatcataagggtctgagtgaaaactctttagttaagtgaagcaaaaggagcaccagtgaaaagtggtggcactagtgattccagcagataggcaaggagatctgaaaatataatttctcctacttaaaccgttttttaaaattctttctgtttcactgtaaaacttaaatccaagtaccggtgatcgtaagatttaattagagaaaaatagaatttgactcatttgtgatgcaagacaaaataaaataagattaataagtaagttatcaagcaggtcttactcaaatagcatctttttggttacaaaatgacaggggacacaaatatgattgtagaatttgacctagtaatcccagttcttaaagattattttagtaaaataaaagcagtttaatttaaaagataaggaaaacttctaaggatgtttctagagccatcatttctaatagtaacaaatgagaaaagaagcttgaacatcaaaaaatacaaaaagtttcgattaagtcagaatattatgtagtaatcaaaatgatacatgagaagactgtgtcagaagaaagagcaatatttaaggaataataatgtggtttagaaagtaagataaaaagtatacaattattattatagctccattaatatgcatataaccagtcaacattgggaaggaaaaaagaaaataaaagtggttacatcttggtagaatcatggcttaagtaattttcaaagtctttttctatatataattaggaactaataaatcttttaaatattctacttgtacttgttgactaatatgcacaatggtagcagggacagaccattagcttttacattatttttgtgaattcataagaaattcacaaaactagaaaacaagtataaaattccttaaaatgagctatataagtagagtagctatgttgcttttttcactttgataaatatgaaaatgaataataattttcaaaatatatagaagagcacaggttacaaggaagtacctgctgtatctttataatgaacagtgtccagtcaattcaatttccttaggagatagaagaataggccaagttacagcccgttggacaatatgatttcagaaactttcatacatgattagcaatctgaaaacactgaatttctgttctatggattcagcactatatgataccattctaatgaggcttttaaaaaatgtggtaatttgaggtctgaagtgggttcaaagatgtaacaaagtttggcgctccagaacataaacaaaacataacacaggtgtggatgtctaaacttttgactgtacccaatcttaacatctggtttttgtgctcaactgctcacagtcatgtaaaatgtctcaactgttaatgactcagtgttaagtgagaaaaaagaaaaattaaactctgctgttgaataccatgttgtaaaatcctcatctttagagattctaaaaatattcatagactacacccttttgaatgctgtggcaacttatcccctgaaaggagcaggctaagccaagtgacatgaagatattttctctgtttccattaaggttatattcctctctgggtcagtcaaatcaaacttgtagcacgcatgtctaatgcagaatcactgatcaatcaacgtgctcttttctgaggagtcatggagctccatatgccttatgatatttaggacatattccaggaagctaacaatcaatgaaagcttttttcaaacagacttaattaaagagaagatgaatagatgaatgaacttggggtaaaggtgttcaaatgtctctccaattttacttcaagaatgtttaaccccattgaacttatcagttttggttttatcaaaccaaaattctggatatacagatgtagggttcatctttattgaagggtttaatattggatttcctatttcaaaggaatggaaactgaaaagataatattaactcagaaatcagttgacagatgtcaaatcaaggaacatttgtaaaaaaaattagactaatgttcaagtacagatagagacattttctgtaataaaatcttatcacagaatagcaatgccactgaacagacaagtataaagtaataccaaggacaaagataaaaagttatttctatttttgaaaagaaattagatgatgtctagtttaaaaaaatatgtcaaggtataagattccaatattttatttgactatacagtttaggttgtttttcccattaatgtagaagcacattacatatcgttttcaaagtctaaatgtgttcttttttaaaaaatgataaatatgaagggcaaaatattcatcttaaaccatgagataaaaatatagaggtttttcatgccgctatctttttggtaatcaatgattgaatagtgaatattggtttacagtgcagctatttaattattaatacatttgttttttcttagaaggatttaatattatttttacattttctccactaaatatatcatttcaaaattatctacaggaatatgcccaaaagaatgatcaaagcttagaaatattttgcaactctgtatcatattgagatataaaaacagaatcaagaatgatattgacaaaaatcaggttagcacatcatctagatgataggttttcaatctcctaaaaaataatgcattacattaattatgcatatttgagctttaatgagaaaacattgtaaggatgaacaaaatcctttaacatcagagctgacagagaggtgagagactgcctagttcaacctcctttcacaaatgaggcaattaaacctgtaaaagactacatgatttgtgcagttcataaccttcatgagcaggctaatgtctcctgtattttcttctgtaccctaatatctacgtagcatagaaaaaaaaatctctttgaattgttaaagtaaaatgtcttacattgaaaggcagtacttccacatgctaaagagtaagtaagaatttaagaaaaaccatgaaacaatgtgaaagaaatcaaactgagtggtaacaaaataaacacgcttcattgtggaccacaggatttcatgaaggataatgacagtctttcccatgtttctgaagttcgctgtaaagatacaggtttaaatctcagtaagagagattgagattcaggtataaaggaaaacttagagcgaaagtcagtatactagggccaaatgatttcctgaaaggttatgaaaatgataggcatatacctattagtgaattatgctaaatcactgcagaattcagtgaaaggtatacactttaaatgaaatcatgaagcaaattaagcttttgacataggccattaagtgacaaagccaaggtaagtgtttacatttttctttttttttttttttgagacagagtcttgctctgtcgctcaggctggagtgcagtggtgcgatctcggctcactgcatgctccgcctcccgggttcacaccattctcctgcctcagcctcccgagtagctgggactacaggcgcccgccaccacgcccagctaatttttcgtatttttagtagagacagggtttcaccgtgttagccaggatggtctcgatctcctgattttgtgatccacccgcctcggcctcccaaagcactgggattacaggcgtgagccaccgcacccggccttcatttttcaatttagaatctcggtctaccacctcctcttgatagggagtgggaggctgttacaaattactaggggccccacttttctcagtggcctcaaaatcattttatttatttatttatttttacctcactaggatctaaatctgtttttagtggctttgaaaactgtttctaggactgaactactgaattacatttaagattgaactagtgaatcagtgactaaacaaaacaaattttaggaaaccattctcttcattgttcaacagacaaaaaccaacgaattttatcacttactagctatgtgactttgggctagttatttaacctccatgtacctctgtttcttcatcagtaagatgctgattataacagagtgtgtctcaaaaactagtataaaagtgagttccatgtaaagagcttagaataagagggtatacacctaattcattctataatgaaacttaaaaacattaagaatcctcaaggattacatgaagccaatctgaatcataaagacaggttaaaaagtctaaaccaaatgttagcaaataaagcagcaataaatacatatttttctatgtacctatatgtgtatgtatatttgtgtgcatatggcatgaaaggctttaaacatgagatgttctaataattcacaatgttaagagattaaaggggaaaaaccacagaaaattattcaactaaacaaccattcacgataaaaatgtatggcaaatttggaataggaggaagttaccaaaactaatcaaagatatctaatcttgatggtgaaatgtggaagcatgctctttaattgtagacacaagtaaagaatgcttgttctctccatttctatttaacagtcttttgaaagcattgctttttttggacaagtgtcctcactgtcacctgggagcttgttagaaatgcaggttctcagtgcctgacctaccactgaaccaagatcttccttttaaaaggatccctcagggattcatattttaaagtcagagaagcatccgtgcagccagtcaataaatcattttaaaaagtggtataaaatatagagtataaaaattggaatggaagaaacaaatttttgttattcacagatgatacgattgtctacaaagaatacctaaaagaatcagaagaaacatcattaaaagtacatcaaagtttgaaaagtttctaaatatttgttcgatataaaaattattagatttggatatagctgcagcaagcatttggaaaatataactgaaaattgttgccattttgtaatagcaacagaagtctacagtggatgtgaataaaaaatgtataagatcttcgtaacaaaatgtataaaatgcactgaataacactaaaggaggcaattaatagagggatacgccacaattatagctagaaaggtaaagcagaccaactgtactgatgcgtgtcaaaggtaacactaccagtcagtggaaaaatgatggatcagtcaatcgatggtgtggaaataactagttagccatatgggaaacatacaaaagtggatttcttctcacactgcacacagaattcaattccatatgtaaaagaactttacggtgaaataaaaaacttgaaaaatttttagaagggaaacattattttaactgtgattcatgaactatatgatagaatgaaaacaatgacattttatatcatctgggacattactagatgtaaaataattaagtttattgacctctaaaccagcccaatagggaaaaagggagtaaaggggagcatcttctaggcaaatgatgttcccatacatagacttgccagagcatttgcaagattccctttagaatcgatgtttggtctcttgcctatccctcctccccaggcagtcactttctctggattttttttccctctttctttagcttttccttctcagtcctggcaataggccttcaacaccacaccatcaccactccaccaattctggagggatatgattttcaaaggaacaaagtttttggagttgagttccagcactaacatatgtatggacgaagataacagtctacagctttctgttttcctccctattgctctagaagaaaacgctgccaagaaaaagctacttctaattttttcatagaaaaaaactgctactaaagtatttttttaagaatcattcttttcttcgggagaagatatttccaacacttgttgtgatcaagagaaattgcagaatatttttaaaattcttaaaaatcaatcagaaaaaagagtctggaagaaatttgaggaaggcttagaaataatttttatagaaaaagaaacatgaatcactaacaatatttttaaggcttaaatgtattatcagggaaattaaaattaattaaaaaattagtatcatgttaccactagattgacaaaaaatttgtctttcaaaaaacacgagagcttttataaactacatgtgatcacatattctttctccaatactccttgagaactactagattataaacatacatacacatacataggcacacacataggcacacacacacacatacacagtcatttaaggttaaaatacggtaaatattttctaagtcacttaaaattattgcctgtggatttttcatgtaaaatattaaactcttccaatgtttgaacttaatggttattgagaaatacgaaaaactattagctttcttgatttaatatagttaatattgcttataaaggaaagaaaaaatgcttggctacaaggtcatctcattttaagattacattgattaaacatgtagtatagacagggcatctaacccccatttcactagccagcactgaaaacttctttaaccttgcataaaatgcatgcatattctttgaaagtctttttttgtaaacgaagtattagatttttaatgtaaattataagaaatgtaatgtttactaatgccgtcaagaatggcaggtcaaattcacctggtttttaaagatcaaatgcctacttttacagtcacctttcaacctttgttttagactctaggattcgtttgtcacaggtttgcctatttgggccacagcttccttatatagggtacagagcagcattcaaaggtagtgtttaagtatatggacttgggtgctagatcactgtgcactaacacccagctcagacacttactagctgtgtgacctggggtaacttaacagagcctcattgagctttggtttcctcactagtaaaatgaagctgaaaggaggatatatttcatagggttgtagcagttacatgagttaaaatacctgagctatttagagcagtgcctggttcatagcaggtgatctaggagtgttattgttcttcacgttattcacatttaatagcaaatcatactgcaaaaaatggtgtcaatgtaatggtcattacaggcaatctaagttgcttttgctcttgacagtattttacacctttaaagtttccagtaaaaaagataatgctaataccatttataaaacagaagaacaaagaattccttgacaatttaaatatctaaatttattagttaaatcaattaattatttgttgttgctgacttccactaaaatgtgcctaatcgttttatgaatgtcttcctattccagtcagtatttttagcaggtttaattctcaagcattccaattggatgtgctggaatttggctcctattaactcatggttttgtcctagtgattaatttatcctaccagattgaataagtatatatgtatgtacttgtgtgtttgtgtgtgtgtgtgtgtgtgtgtgtgtgtataaaatttacaccagtggcaaaaatagtgatttcattttgccagtttgcaaggcaaaatgatgtttgctattgtatttcttttgctaaaaaaaaaaataaagcacgctcgagtatttttactgtctgcacactatttaacctcatgtcttattgtgtagctgagtcatgatgaatacaacaagcaaacatccttaatgttctgttttgtcagtgctgggctgtgcactatggtggctgcccaggaggaggggggcaggacatgagcactcacatcaaggatcttatatcaatttaggaagatagaactaaaacacccaaaacaacagtgagcaataccaaatggtttcagttcaacccatgatagtgtacaggagtcgaataaacaacaggaatgaaagaggggaagatggcaatagtcagggaatgtttcatggctgaaggggtcacttatccccaattcaggcattcgactaccagcttcatgattctgccatatccacatttctacatcatgatttttgttgtttctgcatcccctatatactattattaattttaaaaattctgtaatagactagttttttaaaaactgaaataaaatgtcttcatttaaagaagaaactttatatcacaactataaatggaaagtcagtaactcttgccataaatgcagcataaacagaacaaccttattagtttctatccagataatgttgccttcgaaaggcactaggctacaggccggtgttatctctgtttataagacaaagcaggtgttaataagtgttagagacttagtaaagccaacatgagactttctgctgtccttccttcttccctaccatctttcttcccttcctttcttctttcaactttcctctttctctctctccctccttcctcctcttcccttcttccttccatcctttagcaaatattcattgagcacctattatgtgacaggtaccattctaggcacagaggatacaacagtgaaaaaacagaaaaaagcccttgcccttatagagcttacattcttgttggatgaaagcagtcaataaacagataacaaaggatacagtaggtcataggtgctatgaataaaaatacagcagggaacgtcaaggtggaagaaaaagcatgaataggaaaggattactgctaaagtaacatatgagcgatgatctgaagggcaggatggaaccagccatccagatacttagaggaagagaattcccagcactgggaacaggtagtgcaaaggctgtgatgcagaacatgcttggcacattcagggaacaccagtgaagtcagagtggagaagtgagtgggtgaggcggacagtggtttgagaagatgtcagatccaggtcacttgaaaggggcggtagacatagatcatgtagaagtttaacagacatagcaagaatttgactttgactctagatggcatgccattggatggctttgagcagagagcaacacgatgtgaactaattactgtttttgtagaataactctgctatgagattagactggatgggcaaaagcaccagtcggaaaactggttaggagggtatttccattaatttaagagaaagatgagagaacagtcatgtgggaagcacaggaagtagtaaacaatattggatttgttgggcaaagtgtatccaccaccccccaaatacacacacacacacacaaatctctatctcagcacttatgtatttatggtttataaatgaggctgtttatgggcaggacacggtacctcacacctgtaatcccagcttttttggaggctgaggtggggggatcacttgaggtcaggagtttgagaccagcctggccaacatggtaaacctcatctctactcataatacaaaaaaattagctgggtgtggtggccagcacctgtagtcccagctacttcgaaggctaaggcaggagaattgcttgaacctgggaggcagaggttatggtgagccaagatcacaccactgcactccagcctgggcaacagagtgagattctatcaaaacaaacaaacaaacaaaagaaacatgagaccatttatggggatggggctgttctccctgccccaaatttgttgtcagtgactggcaatcatgccttattcatctgtaaaccttactgaccacagtgcctgataaaggtgcttaaaaagttggtgcgactgaatttcagatgagtggaataatgaaaggcacagaggaaagaaggctcacagtaggtatttggggcaagaagatctacgtgggaagtgcagaaaggcatgggcattgtggtgaggcacctctcagagaaaccgaggttcacattagaatggatttcacgtgaaagaagtagaactaagagaagtataagaggagaacgatttaagatgataggaaagaggccaagtttcatggaacctttattaaaaaaaaaagaaattccatataggttagatttaggaaatcaggattcggaaagggctaggatttactacataactttcattctgaaatccttacatttcaactatcaattcactgaataatgtcaatattttattttgctgcttttaagagataaaaaagagctgttcataactaatggaatatgtatatgcacacatacacacacacatatacatatatacacatatatacacatatatacacgttgtgtgtgtgtgtctgtatgtgtgtatatatatataatgtatatgaaattcctcaatttcaaagactggaatagaaacgttcctatagatatacaaggatcatttatactcctaggatgaagagacatgcatcatgaaggtttacttgggttaattaggtatatttcaagggtgattaaggaacaataggagatcactaaaaaaaaaaaaaatctctgctgcaaaataaaactaatggaaaactgaggcaggactaggacagcagtagagaatgatgcaccactgagaatgggggaagaggaattaaggcagatagacctggaagaaaggtggctggaggagcagatatcttgtctttacatcagtgcattcctgatgtataagggagacttggcccatcttgcataaagcagtcaggtcagagtaaaaataaaaacagatgtataactgcccagtctcttgctggaaacgtggagaccccaagtcttgtatggaagggagacaaagtcaacagctatttttgcaggtaaaagagaggatttttttgtttcctaatccaggtcatcctcatctcttgcctttacttatagacacagctttctaattggccttgcaggtcaacacttgcccatctgtgcaccattcttctcccagccaattactggcctctaaactatttttgaataaatagcaaatcttatattatctgtttcaacctcatttcctgacactctttccccactttaccccaaattgcataacttcctggttaattctttaaaagttgcctgttctaacactaacttcttcctccctccccaacccatctctacagttaagtttatgtcctcttcttatttgatcctgtagcaccttccacctgtctgttataatatttgatacacttgtaattctagatctgtcaccccagaatgtagaaaagtgtctggtacatggtaaacacttaatatttgttaaccgttgaaggttgaatgtttactattgatgaacatgaagataaaaagatagtagccgacaattattgagaatgaaagggtttttacactaatttacatttcagataaggtacagctttcattgagatttaaaaaaaactcaggtttgaaattattatagaacattgtataatttcccatgttcacaaatttaaaaaatacagtacactttaaacaaaacagagttcacataaagcatatttgataatcagctcagctccttggtgaaaaaaactaaaatttggaatagttaattgaatggctatcatttaaatattttaaatacttgttcttgaactataaataaccacatagaaatatgaggaaaattaaatttaagagggtgtttatttggagaggaattttaaaacaagtcttatgaatcatggtaaatacccttacaggtatactcagggcactggagtgcactttatgctccaacaaacccaagacttagagacagttgctagctgcacacaaacagtgtcactgtccactattttacacaaacggcaattgagtagcaagggaaggtgaattcctcagtcctgagttacttctgggtgtgcctcagatgtttaagctgcacattaactaactcatttaggcccccagagtaactattaatgtaccaaagctacaatttgagaagaccctttatttccaagagagctggaagaatcttcaacaattcataatacttgttcttattaaattgcgaattctgggcaaagaatcttgaggagtaaaattgcctatgccatttcacatgaatgatatacagaatgtgactctgaaatgtctgccattttcagagcattacacatggagagcttcctcaattttcagaggacctctactgctacagggaaaatttcggttcacttgagttagaattatccttaaaagggatagaaaaattcaggaatgcaacaacattgacttaccaagactcacaagttgtatacaccatttagaaaaagtttttagccttgaaaaggaacatcttgtattattgttaatatgaatatttatgaagcactatcagtaggcttaactcagtccctgctcaattagcttataatttaattagtcctaaatgcaaatcctctaaattggggtggttggcttttgaaatgaatgccaactaatatcattattgatggctcactatcttctgcttctctctctcatttctcttttcttcttaccttatacatacattttgctctcaaacacccacccttcctcaactgaaaggatgtaaatgaaggtacacctgcaaaagcagaagccctgtggtccacattgaactttaaaatccttattagcattttgtatctgaaaattatagggatgttttgtgaatttttatagatctaacacaattgtcaaatatcagctttgaaccatgaaaacatttctaagatattacgcaaactaaactctaaattgagttttctatttctatttgaatttcacatatctaaatttcctatgttgtttctgagagagctccatatctgtgctggagttggttcactgcacaacatttcttacaggtttagatagcacaccttgttttgtgctacattctctcttgggagacctcagttgtattacaatcatagatggttgcttactaatacagaaagtagaaaaaaaagctgcccctttgaaaactatttaataactttaataagctgctttgtaaataagtaaataaaaagatacacttccttttgtcaaagcaaactctttgatatggtctggttctgtgtcctcaaccaaatctcaacttgaattgtaatgcaaattgtaatccccacgttttgggggaaagtcctcatgggaggtgattagatcatggaacagattcccccatgctgttctaataatagtgagtgacttctctggagctctaatggttttataaggggctttttcccctccactctgcacttctctctcctgctgccatgtgaagaagaacatgtttgcttccccttccaccatgtttgtaagtttcctgaagcctccccagtcatgtggaactgtaagtcaattaaacccgtttcctttacaaattacccagtctcaggcagttctttatagcagtgtgagaacagattagtacagtcagttggtactgagagtagtgtggcactactgcagatacctgaaaatgtggaagcgactttggaactgggtaacaggcagaggttggaacagtttggaggcctcagaagaagacaggaaaatgtgggaaaatgtgcaacttcctagagacttggagggctcagaagacagaaagatgtgggaaagtttgggacgtctgagaaacttgttgaatggctttgaccaaaatgcttatagtgatacgaacaatgacgtccaggctgagttggtctgagatggagatgaggaacttgttagaaactggagtaaaggtcactcttgctatgctttagcaaagaggctggtggcattttgtccctgccgtagagatctgtggaactgtgaattagagagatgatttagagtatctggtggaagaaaattcaaaaggaagcacaccataaaagtttgagaaatttgcagcctgatgatgtaatagcaaagaaaaacccattttctgggggaaaattccagccagctgcagaaatttgcataagtaatgagatgccaaatgttaatcaccaagacaatgaggaaaatgtctctagagcctgttagacgacttcacagcagcccctcctattacaggcctggaggcctaggaggaaagactttattttgtggggtgggcctagggtccccctgctctgtgcaaccctgcatcccagctgcttcagtcccaaccatggctaaaaggggccaacatacagctcaggccattgcttcagaaggtccaagcctcaaggcttagcagcttacacgtggtgttgggcctgcaggtgcacagaagtcaagaactgaggtttgggaacctccacctagatttcagaggatgtatggaaatgcctggatgtccaggcaagagcctgctgcagggacggggccctcgtggagaacctctgctggggcagtgcagtaggaaaatgtggggtgcaagctcccacacagaattcccactggggcactgcatagtggagctgtgagaagagggcaaccatcctccagaccccagaatggtagctccaccaacagcttgcactgcgcacctggaaaagctgcagacactcaatgccagcccatgaaagcagccaggaggggactgtaccctgaaaaaccacaggggtggagctgccaaagtggtggggacccaactcttgcaacagcatgaactggatgtaagacatggagtcaaaggagatcattttggaactttaatgtttaatgactgccctattggattttggacttgcatggggcctgttgcccctttgttctggacaatttctcccatttggaatgagtgtatttacccaatacctgtgcctccactgtatctaggaagtaattaacttgcttttgcttttacaggctcatagacagaagggacttgccttgtctcagtcgagactttggacttggactattgagttaacgctgaaatgagtcaagactttgggagactcttgggaaggcataattgtgttttgaaatgtgagaaagatgagattttggagggcaaaaggtggaatgatatggtctggctctgtgtcctcacccaaatctcgaattgtaatccaaattgtaatccccatgttttgggggagggaacctcatgggaggtgattagatcatgggagcagatccccctgctgttctcatgatagtgagtgacttctcaggagatctgatagttctataaggggctttttccccctttcctctgcacttccctcccctgccgccatgtgaataagaacgtgtttgtttcccattccaccatgattttaagtttcctgaagcctttccagtcatgcagaactgtgagtcaatgaaacctgtttcctttataaattaccatatctcaagtagttctttatagcagcatgaaaatggactaatacacccctgcagtgataaacattttcatcttttgagaataatcaaaaatagatgtgcagcaaaaatgtcataccattgcttcctgtgccctgtgatgcacaatggagcaatgcagcactcctcactagataaacattctgaaataacagtacagggcaagcagtcctaggaaggcagaccacagagcttagaaaaagtacacgctgcagtttgaagtgcaaaccacaatgaggcaatgaggagcttatgtccactctcaatataaaacatatctctgttaagtcctcaaatgcctatggttctctgcagtcacccattaatgacaactaagggaccatgaagggggagacatggactggcattgtctgctgcaccattcctggtggtttgattaaaaaacactgaaactggagaggatatgtttagaaaataattgtatgcttgcttcaattcagcttttctctccacttttaaaatcaggtaaagccaaactcatatatattcttattatctacaacaattactgtttcaggaggttgacatgtcttgttacctaaaaccactgaaaatttgaatgttgatcaacatttaaaatagcaagaggaatcttttcccattgcttaattttatttttttgagacagggtcttgttctatctccctggctagaatgcagtggcgtgatctcggctcacagcaacctctgcctctcaggctcaagcaatcctcccacctcagccaccctagtagctaggactacatgtgcatgccaccatgcttggctattttttttgtattttttgtacatatggtgttttgccatattgcccaggctggtctcaaactcctgggctcaagcaatccaccagccttggcctcccaaagtgctgggattacaggcatgagccaccaggcctggccaattttatttcttacttgactttttttgttggtgtagccattctcctattgatagacactgttcattttaatttttgactattacaaagaatgtttttgggaaattttaaaatttttttcttctcatgccaaaataaaagcttataacagaaaatataggcaaaacgtgaatatgtaaaagtttctgcaatcctacttaccctgaaataaccactgaatggcatggtggttgttatggtgtgtgtgtgcatgcaagtgtgtttacaacatttatctttttctgagtataagcttatatgtaaattttaaatttacatatatgaataagcaaatgcataaatttgtaaaaattgaatggtactaaacatactttttataagatccttttttaaccctgtaaggctattaaaatattcaaaacactatcctttttctagtactatgttcacaaagtattcattttaaaatatcactatagaacagtatattacagcaggcaaagaagttcagttgaaagttatactcctaatatttgagagagataagaatggatgaagtttgatgtacttaatcctattgcaataaagtgaactttcaaatatttcaagccttcactgcaaagtaaaataagacctattcttatttcttcaaaaattttatatattataagtaggtaaggtatctccagctgaaagaaataattttatggccagctttccaaaccttccaaattgtatatcactttcttctcttttaattctgctgtctcagatatttaattaataagagctgctgtagcaaggggcttgtccataattttattgtcaacatttctgagtcatctacttctgatttgttttaaaatcaaatgcaagatatttggctaacatacaatcaccatgagctaggaatataacaaataaaccaatgacagccttctctgatgcacccttactttcatctgaaccattgtgctaagaaaaattagttttttattccttaaaagtcttaagtatccttctgttatatctgaaacctcaactcctcaactccttttttgttagttgaccatcagccatcaaccaccatccagttaaagtcaatgatgtgaactgcacgcttaaaggtaagcaaaattcttttaagttctgctttgaaaagagggaacaaaacccttggtgacaggagtttgtaatctaataggggcactgtgattaagtgacatagtgcatacatgtgtgccaggaaacaaatctatactgagtacaatcagaaacagagatcctatcagacatatgataaagcttgcttaaggaagcttgagggaggagtgacaatctttattatggaaaagggtgtagtttgggaaaatactattacatcaagctgggaaggacagctaagagaatggatgacagaatcaggatataaaaagagcataaggtcaaaatataaccagatggagttaaatagggtcacatttgaagtcctgccctttggttaaaacaaaaacatctaactgagcagctgccaagagagaaggagatggtgcctaagtcaagcccttttagttaagtgcaggatgtcacaacgatacgatgtggcagccagtgtctatctaatctaaagtcactttcattgataaataaccccaggatgaggcaaagaaaaaaaaaagtctctatgatgttctgagctaattggattactttaggaatttctggaatttgctaatctttgggccattaaattacaaaaggaggttatgagataggagctagtctaatggggagtcactagaaaaggaaagagatgtgatggtataatggtagccaagttaaggaatagaaaacatagggaacagacctgatggttacagatacaaaagtgtcacatgaaaatggaatttcaggcagttgtgtgctgggtcaccaaaatgtcattcccaaagtttactccatcgcacctggccactctgcccttgaccctcgactcagccaaatatgacatatctctggaaggctggcagatgcaagctgaacggttggccataagagcccagctgaaacaagagtacctgcttcagtacaacaaccaactctaaccaccaagggctcatcgaagatcttgccttaattcgttggacctatgcaagatcagcaaatgtctattctaatttcagactcactcctaaaactcactcttgggagctctgtgtggaattgggcccctcttcttctggtattatgttttcaaaactgacagggataggaaagaaaaacttatccaggaaggaaaattggatggaacatttaacatctcatattaagtctggcaatgatgactataaggatcttgcttaaataaattgtctattaatcattaaaaaaagaaagaaaggaagaaaatggaatttcacttgccctgtgtgtttccaagattcacaggtaggagcaatgctacttagaagtttcacggaggccaaagttcagtgaaagcaagaccaagccaatgacacagagccagccaatgacacatcaacactgacaaggagaaggatgtgcagcaataggggcacaagcattgacctttgaagagtcacatcatagctgtgttagcactgaaccacagggcactggtgtcttttttcatcctgaaaattctgattcaacaaaaaagtttgtttccttcccaatttaccttcctttgaactaattaaacttctatcctcttcatccctcaactattaaatatttaaaaatatgttgaccaatttaaggttttgaaataaaaacattatatgaccaaaaggtttgataaattctcaaaagcataacactgtctacttctctgtaggtatctcgtgagcaccagatactaagctcccttgatgaaaatagcttttcaaaatatgatagatatgctagtgcactgtattcggaaaaatgtgagttcatatggacctgtcaggatgtaaaaaacatgcaatacttggtgtgtttcctaaggagggccccgggtaaggccccagtgctgtgcttctcacattgaaaacacatatgaatcacctgggatcttactgcaatgcagatggttacccactaggtcagggtggggtccaagaatttctaccaagtccaggtgatattcatactgctggttcatggatcacattttgagtagcaaggtaaggcgtatttcccatgaagcaccattgcagaatgtttattactaggccaatattcacctaggcatttctttgctttatatattaacacttctattgacacagatcataaaatttctgttttcctttctttgaaaattaaaatatatggtatactaaaacttaaaaaaaaatcagacagttttttcccccaggtacttaagaggatacaaacccatgaaacttggcctcaattagattacagtggtccctcaggatctttggggattggttccaggtcttcaggcagataccaaaatccatggatgctcaagttccttatataaaatgacatagtatttgtatataacctacacacatcaatatactttaaagcatctccagattacttatacctaatacaatgtaaatgttatgtcaatagttattatgctgtactgtttagggaatgacaagaaaagtctgtacatgttcagtatatacacaaccatattattaaaaaaaaaaattggattgaatacacagatgtggaacccatggatacgaaaggcctactgtacttggaagtatcaataggaaatttcatcaaaattgatggtgaatttcacatagaattaactctcattttgtttttatttatttagcatatgtaagccggtctctaataacaaaataattacaatgactatttttctccagctctaaatttattatagcaacaactcaggatcaaatataatttgagatccctttgaaggggtataagctgttggttgataatgatgttgagtagatggtccaaaaagactcagtctgaacatcctcaattgtttgccttagaccaaattctaagtgattgtaagaattcatcttctttgaatacggtgtattgaatttcttaatgaactctccagcaaacatgaaaaagtaaatgatgttatttgggcaagactgtttgcttatagaaaaataagaatgtcatctgtggagttttgaaacttcatcctaaatcatcacacatggttcccaggtgaagcttgtacatatattctgaagtagaaactgctcttttaatggtgatattcagaatctagtcaggctgatcattgtcctagtctcagcttttagcctcctgtttccttcatctgaaatgttcttgcccttcatctcctttgagtctatgcaaatgttaacctggagggctaccctattcaaaattgcatccctactgataacttcctatgtcattccctgacttttttccttagcacttatcactatccaacatatattttttacttatttttcttgaatattgtctatcttttctgtagttttctgctgctggtgtaacaaattatcagaaacttagtgatttaacaattaaaatgtatcattttatagttctgtaggtcagaagtccaacacaggcctcaatgggctaaaatcaaggtgtcttcagggttgcattcctttctgagtgggctaagggagaatctgcttccttgccctttctagctgtccacattccttggctccaggcccccttctttcatttccaaagccaacaaagttgcatctgtctgaccctttttctgttatcacatctctctctaacctaaccagggaaaagtctttgcttagaaggacttgtgtgattagattgggcccactgggctaatacggacactacatctcaaggtctgtgcccctaatcaaatctgcaaaatctttttttgcatgtgaggtaatgttcatttagtccagggattaggcagtggagctctttgcaggggctattattttgcctatattcattggaatgtaagctccaaaaggtcacagatttttatttgtttgattcactgttatattcctagcacttacagcagcacctggtatatagtataaactcaaaaaatatttatttcagaaaattaatgaaagaaaattggattgggctaatgatgtcatgacaaacacatatttgaagtgcaggcgctagacatagacccttactagatttttttgttttgatttttgagatggaatatcactctcacccaggctagagtgccgtggcgttatctcagcacactgtaacctctgcctcctgggttcaagccattctcctgcctcagcctcctgagtagctgggattacaggcacctgccaccaccatgcccagctaatttctgtatttttagtagagatgggttttcaccatgttggccaggctggtcttgaactcctgacctcaggggatctgcctgcctcagcctcccaaagtgttgagattacagatgtgagccaatgcatctggctagcctctactagatgtttgaagagttaatcacttgaattaaataaaccttagtcctcatttgaaaaatgagaccatcactttgcccacttcatagagtggtttagagaatcagtcaatgtgatctgcactgaagtggtctgaaaattcttagctaaagaaatgtaaattattgatactatactttttaagtcggtcttagtatccttacctaaaaatttaagtttctttgagctcaaaatatcagccattttggtcacagttcactcctcagactttcagaaaccccattcaagatgctgaaaaagatatatgggaaaatcttaaagcatggcagtagccttctttggtttcttttttgccaaacataccattcctcagggtcattgccctagactgagtgtagcatgattggaccatctgagaagatggtgggataacagaaagttatttggagtcttcagacctcagtctagtccaggctctttttgactgggcatttccattagtatctccaagccaccctgctgcctagagtttatcattctcagctacatgttattaaaacatgttagcaagtactgcagtggtgcagaagaaaggccctaagagccttattgtttttatttccttaaggtaggactagaacataatttaactaacacactgtcttcatataacttaagtttataaccagtatcatagaaaagataacatgcccacaaatacttgtagaattattttgctgatctttcaaaaaatggcacttagaacttttatcatctatttttagaatatttgtacaaggaaatgggcctctccaattttattgaaaacatttgtcaattttattaaattttttaaaactcagaatttgcttggaactcatatgcttatatttactagaagactaaaaatctaaaggtttaagatagaattttctattgccttagcaaatctgtaatgcccaaattagaaaacagttatttttctccaggattgatgtaattaaaacactaaagggtgggggggtcaaacaacaacaaaacagtcttaatatagatgtggtttgtttctctgggcctgtgactacatatggatatttggaaacattacagtgtttggcgacaacaaagctattcattgttagtcaacagatatgcacactgtggtgaaaactcaaccaataaaattgttaatttaatgcagtgattctcaaagtgtggtctccagactagcagcattagtgtcacttggggtcttattagaagcaaaaaattggaggctgtaccacagatctacagaattagaaattttggggaaggggcctggtaatgtgtggcttattggcccttccaggtgattctgatgatcattagtggatgcccttttactttcttaccttaaaatatcttataatcttgtttgatagtgtatatgaaaaagcacaattgctttttaaaaggtgaaaatctgagtcagcaattaaggctaagtcatatctaaaaatcatgtgggcagagtattttgaaaactagatatttgaatcagctgaaaaagcctctgctgcaacccaaacctaaaacctcccctaaaacccaaacctaaaagtattatttattcaataacttacataaattatccatgtaaaataaacattgtatatattaagaaatgcttttcacatgttaattgaaatctagcttattttcttggaattttctcttgcattttagacatattttccagagattgattttcttgctctaaaattttattggcaacccaaaaaaagcaaaatcaaacagacaagccaacaatattctcatataatcaaccagattttttaaatccagagtcttaaaaatatgggtattttcccctgcgagttaaataagcacaaaacaaacatattgtatggtctatagttttattttagtaactggaaacactattttgcctgcattccaattgttataataaaggtgaagcaaaagtcctgagacagcctcaaggatctggtggctaattctttcaacagaaccaagggcagggtccgagatgacaaggtctgtttcagctgggtctcaggtgagtgtccagggtatacagaatggggttgaagactctttccacaagagcagcagaatagtatgcacatgaaagtaccccattaccaagaggccttgtgggatgaacctgtgtgcaatggagttacaccatccaggacttcctgagtagaggattttgggttattggtaggcaatggagagccaatgagatttcaggttgtggatttacatatcacagtctctttttaggaagatgaactccagccaaagtgtaagctctaaactgaatcttacagagcctgttgtcaggaaattctggcaatttctagcttgacaaaaggccaggccaaagcagtagtggtggtgatggaggccagaatgtgagaaacctttgggccaggtttgaatgtgatggctgaaggaaaaaataggaaacaaggtaaaatcttgggcttcttgttaagtatttattaatattgggtatgatgcttattctgcattacttatccatgcaaactattgaggacaacaagataattttgtgcttagattggtgtgtgtgtgtgtgtggggggggggtcctctatcatgtatctagctgattcaaatcatttttttctaaatgataggaacaggtgaaaagtgatatccctgggagtccgagcaagtagggatgcatttcttaaccagcagttctttaagtggaagtctgtgaacctctaaagcagcggagtcatgaaagacatttagaaaaatacagtcacctgggtcctgtccccagaaagtctgatgtcatttttctgggtgtctggcccaggcatcagattttttaaagttccccaggtgattgaaagtggataagaactaatgcttgaaaatataagtgaaggcttttttcaattagataatataactttaatttcattctgttgatttgcctaataatctgttgtgatgctaatgaaaccaaagtgttacatatttacctcctagggatgatgcaaaaacaaaaagataatatgtgataaagtacatcaagctgatacctatttgggccctgttgtcaacaatagtgtttcaactttttcctacagggaataaatacttacataaatcactgggaaaatacagcaaagtagcataatttctttgcttttacctttaacacgtgggctataaaattgtctataaaacactatctgccacaacttataataaatacatcctttttattgacataagatgggtaaatatagtttttaaaaggcatcagaggagctataaaggcaaactggatgtcaacacccattttgagggggttaatttttcttccaggaagtttataaatggcaggtcctggaaatcctaaaatcgctagatggactttgccttgcacatacttgacattcaataaaaattctggaaatgcctgaaaaagatcagcacatgtgttgtcttaatatagcacagtaacattacattgtttgggatgggttgtgctgaaaaagttgatctcttccaagacttaaagaatagtgtctgaaatttagcaacaggaaatctgggcagatgtgtaatgaaagtgctgtgaaatgattagaatatctaaaacaaagaataaaaataccatggatttggtaatattggatacacgaaaatggaatatatcaaatacacatgaagttctatctggaaaatttaaaaaattagcttttgggccaggcatggtggctcacgcctgtaatcccagcactttgggaggccgagatgggtgaatcacaaggtcaggagattgagaccatcctggctaacacgatgaaaccctgtctctactaaaaatacaaaaaattagccaggcgtggtggcaggcacctgtagtcccagctactcgggaggctgaggcaagagaatggcgtgaacccgggaggcggagcttgcagtgagccgagatcatgccactgcactccagcctgggcaacagagcaagactcagcctcaaaaaaaaaaaaaaaaaaaaaaaaaaaaaaaattaccttttggctacttttaaagattttccacatgaatgttggaactacccaactttcaatgaagaagtcttagctctatgcatttgcaatatttaacttctcccactttttccaaatctcttagatttcagctgttatgacacatttctaagacctttattcagacccttacaggcttttgaaaagactcttttttctttaatatgagatgtattgtgtacctattacactgaatggcactatagaaaaatatggctaatctgtatttctgtactctttgtgaatgacctaaatacaatgtttaccaccacaaatttggtacaacctacatgaaataagacttcagttttaaatataatactgttccacatagtatgacaaatatatacttggtatatgaaccatttggtatgctacaatacgacccacccccaatttaaacaggcttatctgaagtttacagaagatttaatatagtttactagatgattaaatataggtatggttgtgcgtgtatgtgcatgcacacatattttgctgagtggttaatataaaagctatgatagaatgtgaggataaacactgtattagctaagtactgtagagtaaaagaattcagaggacctggactaggataaagagcacaggaaaagaagatgagatttccataaaacaagctttgacagctttgaccaactcttaactgtctgcctgtagtctacattatgtatgagcagaaagtttgtatttcacatagaagctttccagttattaattaggaaaatgtttacatatggtatgtcacatgagtaggtttatctccttagccgaccaaagtaatgcagatattaaaaagaatatgttgtcagaaataaattattcatgcttcctaacttttctaatttggtaatttgaaaacattaataggatttggtcattcttaattgtgttgatgactatccttgctctctttattctcaaggctagttgaaatttatctcatttatattaatttttctgtctgtggcttctcaaaagtaaaataacttcagaagcttcataagtatggagaaaatgttaggtgaaactttgcagaatcatttataatttatatgagatttttctttagtttttgagaactatcacttgaatatgtaatcatcaaacaggtggccttccacttatttgatatgatagaagaaaacttctaacattccaatttaaatattttatttgaaaattcactgctataataacactataacattaaggagagctgtgttgtaaacatagtccttctttttaaaaatgggaactcttattttatcctgtagctgttatattcatctactcatttttagtgttgctttcaccaaacaacatgtctacagtaaatatatttccattttatgattacagggaagtgattcctaatgaaaatgagaacagagtgctcaaattggggttagaccatccctgttgtgtcatagtttccactgttgaagtaaaatcccaactgaaaaataataggtcttgttagttggcaggcaggtttcactgagtaaactaagttgctttctaggattttgtgcagaaaaattctgcaatgctaaaattctgcaacgctaaaattcacataacacttaaaactgacatcgagagtagtggcccaatcactatgggagtaatcaacaactgtaaaagttttttggctttagcctctgctgtgaaaaagcatgagaagtatttatgagaataaagaggcctaagggattgcattttccacagtttattggacatctctacttggacaaccacagacttctcagaccctactagcccaaatggaacacataatttcaccctcaaactcactcctcttgctggaccccaaactcagtgaatggcctactgttcttctagttgtcccaagtgtcttcctgttcctcgctgtcacacatattgaatgccagttcccgttcaatctatttcctaagtagctatttcctaaatctctttacttttcattctccccttgctgctggtccaagccatgagtaccggtctgaattattgcagcaatgtcccagctggtctcctttccttcagcactgtccttccccaatacactctctacagcacagccaaatactacaacctcaaagactttcccttttgttggaatgaagtccggaattcttaacatggatagcaaggcctgttattttctcttccttgtattattctcagcttcatctcccatcattctccagagcatgtgcaactgtcctctctgcaccctaaactccaccatatgcacattcagtaatgtggtaatgtcaagaactctccactttccaactttgcatatgctcttgtctctgcctgccctgtccatcatcttgctaatttctattcacactgtaggctttagtgcctcttccatgaaccattcatgaactccacatcacccagtcctaaaatcaaggatgactgcttgcataacatcctatattctgcctcatcctggaagtgattatacttcattgtaattgatgtttactcatctagctttaccactggacctctggcttcacaagaatcacatatgtgagtatcttgctcactgtacaaccttagcccattatagtgataagcccatggtaggtgctccacaaatatttgttaagtgaattaatctgaatgcagatatgtacaaagaccacagagttcagatttttgtctatgcccttagctatcatgtcaaagaactggagggtagtgcataataactagctgtcttattacaacgtacctccctgcaatacagtttcacccaccctaccccccaaaaaattctaatcactagccagatttaaatctatttgactctacttctttcagtgttggtaagagctatagcagccattacttaagaagagagttaaattactaatatctgtctacccatttctctgagaaaatgaaattacttctctacataattaaaacaccatttctttgaacttgatgaagaagccaattttcttttgtgttcctgcctcaaaaaagaatatatgtctagagagaatattagagaagttattccataagatataactttctgctagaataaacttcattattcctacaaaattatggaagtagctggctatacttctctgcttacctcttaatttttcaaaaataacaaaaataacaaaactaaataaaagtctaccccatattttctaaaatagaattctgctaaaacacacacacacagacacatacatacacaaacacacacacacgaactatgaatttctataccattcttcaaaattctaaatattgtcaaagtcattttaagagaaacagaactagtttagttagtgtacatctgtcctatggtattctttgcaccagtggatctcagactctagcatacatcagagtgtcctggaggtctttgtaaaatgcaggttgctggactgctcccttccacctagagtttctgattcattaggcctgagatggaaccagataatttgcatctccagcaagttcctaggtgatattgatgctaacctggggaacacgctttgagatgtgacttatacgtgtaactaacagtagggaagcacatttagttctgtccatgcagttctatcaggcattttgacatgtgctgtcctcttgctctctttctttcattttttttggtaccaatatctaactcagcattactgcctaaatacataaagcctgtattccatgctgaaacttaacagcacaagtgtacatcatttaaaaaaacgaaaacaaaaaaaaccaaaaaacagaaaaaaagagggctatttctgcaagttaaaaaattaaatggaaaaacaaccccaaaattgctctaaggaggttttgccttcaatagcaaaacatgttttgcctcaattgtgatttctttgttcgggagccaaggtggcaattaagctggcacaaggagcaggagccatttatttaatatgatgacagcgtagccctttgtaaatcctggaacaatgagggcccacacacaggctcattccaagttctagttccttctcttccctgttgctcagtgtgaattctcatagccacaaaggaaggggaagattttcaatcctgtcacatcctcccccatttaaaccatttatagtcttaacttataagatatgagtaagaaatcttctttaaacattttgcagagctgatcatcaaatctaacaaactggtggttttgaaatctcctttgctccaaagacattccattaacctctgtgtcctctgttgtgtcattgtgctgagaagagcaagttaaaaatccagtcttaattggggcttggtggtaggattatttttatcttatagatttatttcaatattcattttaggaagaaagaagaccttaggaaggtctaattctcatcagttctggcataagctgagttagggatctcagaatttaaagaaacgacgcccttaataatggcatctgaagaagcaagtgtaccatgctgtgacaattacaagatactacatcagttcccatcctctactaggctcttttaggatggagactctgtctggttcactgctttatctctataatttacaatagtactcagaaaatagaaggcgctcagtatgtagcaattattgcctgactggctgtctctgtaagcattacagggaatgtacaaccaaaatgtataaagtgtaacatgacaccaaagttcataaattaaatgttatcaaaatagattgtttttataaatgaagaaaattaatcagaagatatctttttagaatataacaacctctaacacccagtctacaaatatacccatcatcaaacttctggcaaatgttcaaagtaaataaacacctatcatgacttaaatacctggctttatacttcaacagtgttcatatgagtaaaaacatttttgcttaagttgtctaccagtttataatatgggaaggaattccccatgggatactatctcctccccctttatatagggaatacaagtttggctaaatactttatcataattgtgcagaaagcacatggccttataaaagggcaatcacatatattatcaatgggattgatactattatcaatggtttcctaaaagcagcctctccattttgcaagtctatcaacttatagttctttaccttcccttcagctgaatctactcacttcaggctcagcctgagttcctgaaagaatcctgccagggtgggacccattataaggattttaattgcatctaggtcatgacactcagatctggatctaggggtgactgctggcttctgcatgatctactcttcttctcaggctgcccattccctgagatctacttcatggacactagatcctgtgcctgatgttcaaattaggatggcctcataccacaatgttttgttgccccttctagctttggatctcctgtaaccccaaatagcctaatctatgccgggccctcttatgcccttttgatactatttctcaaatgactcacaagaccagcctctaaggtcaagctagttctcccaggtctcttctagtatcctagtgctatttttttctctgccaagttctgatttcttttccagtccctgttgctaaaatcctactgaatccctcacagccacccaaatcctggcaaggtatgattttaccatcttaagttcattttcagggctgagcgtataataatgactggtcatgcagcacccagtgatcacactgtacagagagtacagacattgggatggaggaagggcaaaaagaggcccttgatactgaaacatattttcagagagtaatataattggtgaattctcatatgctgtgaggatcaaattgatgaaccattttagcactcccacaagaattctgctccctcatttctgcacagaatttcatcttatgaaaaagttccacaattgttaacatactatagcatctcttcatgccaagtagttttgtattttaagaattacaaaatgcactcatcaaataattttggcacataatatatatttctaaattccagaacaaatctctctcttgaaattctatttaaaatacaacctgggcttgtacaccatccagtatgatagaaaaacatataatcaattcatagaagaccaacacctgccctacaggtgctagaatttgacatcttgttgaaattagattgaaatttagtatacagtatgtaagaaaaaaggcagactacaatatttcctgctagtggacatcattcaggcctcagagatgaaatgtgcaaaactcttctagaaatactaatcaactgaaacaagccgcctccaaaacagtaatgtggtcagtctgcatgctgccaggtaatttacaatccatgacaagcagagccaagtgaaagttatttacatttattctactggtagaatagaagagatgagagtgaaaaggatctgctgaatcagatcatgtttgactgaggagtgacagggaagttttcttcaattaatagccagctgcataatttgagctaatgccagctggactttcatcatgaaacgacacagaaataaattattctgtactcaggtgctggcatagtgaagtgaattaatccacttaaatctggaggagggagagagaaagtagattacactatctgaattttttgagcctgttttagccacactttaaggatactgaggttcatgataattattaaaatgtccaagtggatccatttagactcaaatacttgcttgaatgaacaaattcttagaagggaggaaccagagtagaaatggctttatcaaggtcatggtggtttctttcaccaattagtgaaattcatattcaactcagaaggtcagggggaagtgggcaaaaagagtcttattaagaacaactttataggggaattcttgagggggtaaaaaggtgactacaaagatataaaggaatccaggacaggtttagagaggtcaactgcctgctggttcattcagaaaagattaacagacccagctgctgggacttttctggctaggcatccttcccagtggtcacaagtcaatgtgtctcctggctgcttggctatgttcccatccgtctggatggaagagcgcccacccctacacgccagaacttttccttaggggaaagttactgaggttccacgtcaggcaaactttgctcacccatcacttcaagtaaacaactcttctatggagatttcttagagaaaaaatgcacttgaaagcatctaaccaaagcaatgaaggtggaaaaaacaagttatgtgggaatctgagtatagaatatacagacataaaataagctctccaaatgaggaagcagtcacagcttgacctctgaattgtttgctgtttgttccttcaatattcaaactgtagccctggaaatacaaacacaaacttctaaacactcacaggcctgtggcaacaaaatgctacatgccagcttcacaactggggcatgcagaccataaatcctgtagtggcaggaggggaggtgtggaaatagactgtcatcattctgcagcaaggaaaactaggtacaaggaaaaggcaactggcaacacattcctggattctctcattcattgaagaaggaactcagggattgaattacccaattgacgctagttctacccatgccagagggcaaaagttccaagactgccacaggccatggttgcttggaatttaggcagaggtgcttggtccttagagtgtagcagagagaagttctggaaaaggagctcctcatcgagtctggtaatgagcacttctattctgacatggatttcagaggactcaggggacaacgtgcccagaatttaacccttttaatcagtcagcatgagagataaatctaatttagctatatgagactgatgagaaacagtctttgccgtctataacacaaaaggaaaaggacaaaataagaagcccattacttttagttaacattcagagcaacaaataaattcctacaatcacatagcacctggttccatcaatggttggttagtctgggagattctaagctattagctggaagctctctccacagtgagtagtggggagaaggggagaagcgagctgttagctgaattagcaagtgtttttacaaatgtcatatgtagtgtcaatgtgtgtcctaaatgtaacaccctgccaattcatcaatttatagacagaacataggcacaatttctagatatgagattgcatgacagtgtttctcaaggattagtttatttctttcaacacaccctttttgatacgaactgctttattttctagcactcactacatctcactcaaatgtgtggatggcaacagaaaattttgatcattactcagagtactgattttatacattatcatctttaaccttacagtcttctgaggttaaaatccaattacataaaaagcaaaagaacctcagaggtaaagagaccagccaaaatataactatgccctagttttacccctgtatttttattattttgtggggtaacttttatttgccagtcttccttaaaattgtaacttctttgaagatgggaactccatattattcatcttttcatcttcagtgcctagaacagtgcctggaacctggtaggcagtcagaaatgtgagaagtagatgcaggccatgcagccagtcagcaacagtgctgggttttcaatgcagaaatgtctgattccaagaccactcacgtaaaaaaaaaaatgttgcagtttatcagtgatgtttggcaaaagaatggatgttgatattagtttacccagtttcattctaggtagttcacaaccaggagcttctcaagaaatacttgtttacagaattcatgaatccaaattagctctgtttcccaaaaccatagataactggaaactaaaaattggataaaagtcagcttcaacagaagaaaaaagagtttgtattaaatatgaatgagcatttactttgttaaatgatatgtgggcttttcacctagattacaggaaaattactctagcatcaatttttactttgaactttgaagaactttgaagagctatattgagtaaaacccaaagtgctctccgcatgaaaaattctagtttgcccctactgtaaaaattcacaatataaatataatcatgagggtattttctttcatagcatcagtcatttaaaaatacaaatctttgaagaaaaaaaaattgttgacgaagtaaaatagcattaaatcctgtaaaaagattacaggcacaaaacctgaggattttacttgtaaagttttgttgatggagtcaaatactcacttgcattaactctctttccaaaccctgagtccaccccttcgtattccacttgtaataactaatgttaatagcaaaaatatatttatactggaatgaacaataagcatacaacagttgtttggtttaccaaattccctttcattcacagcttaaaatgtaaccaatttagctatgacaatgccagcttagtttatccaatagcacagtaagcactattcctagagctcataattttaggagctcatagaaatgttaaatctcttttaaaatctgaaaaaatgagtacaaaacagtttagattatatttatctttacataaatgcagctacaaaatataattttgtattttttatgaggaggggacccacaaagccaaaagtgcgttgcgctcatcaaaatcatagtgagctagggtatttttaatctttataaaattgctatggcattattcgttgctggaatgccaggagcatgttaatattatgtgccttttatttcttctcacccactaaaaaaatctaatctcacgaaaaatatggaaaagtcttatgaattggattggatatgaacaggatggatatatgacagatgtatacagatatatgatgggtatgaataggatgaatggatataaatcacaaatccaatttaactgggcaatgaaagaaaaaaaattcctaagaaagccttcctttcccctatctcacatcttttacctagaaagcaacaatttagaaatgattacaacttcagagaactgaaggaaaagacgaactaccagaatattgtggcttcataaaaacaccaatttagaaatgcttacccacaaagcttctttttccccttaacactggatttgctaattgaattgagcaaatcctgaatccagctggatatctcagtatgtagtaacaccaaattactgagttagtactgaattaataatctgaactgggtgagtatactcactaactttactcagttactaaaaggctagtatcaaagctaacgtcagaaatgcccttctcatacagtacagcataaccaacaacagtagttcttgtgggcattatgctttcatgccaaccaagccacaccttgattttctgactgtgttgcctatgagttggttctatgttcatccattaataggatgttgacttattaataaatatattatctaattcttcctctacctctaactattctgtggaatagataaaataaggagtaaaaatactttcaattttgaagtatttgttaagtatcttggcatagaaaaaggcaagaagtaacatttgaaataaatttgtaacattatctgtgaattttatttatctatgaacttctatcagttttttataggaaaaaaaggggcagtatatacataattcaaataccaatagttggaacagaaatttttaggatttctagcacattctaagtctcttttgaaaaattataaaatcaaattagaatttaacaccttgcctatatgaatgtcataataatatagaattatatgaattatataagaaggaaataagtaatgacaacctcaagtaaacgttcacttttttcacagccaaattttgacttttttgacagttttatctcagataagaattcctttttcctttcaaaatatcattttcacaattatgctgtgaaatatgtggtcatctgatattataggaaagcagaactttaaaagacttagaactacattcctccctgttgtaatgagatactcttcacatatgaccattttttctggttacagtgtatctctgaatacttgtcatgcatcttctcctcttattctgataaagaattctgattttcctttgattaatccccctcctactgatggaactgacctccacaaccgggacacacagaggcctggtcagtcagtcacaattgactcaaggttgacctgtaatccaagtgcacacgtttcaagtcagccctgggttttccttggaactactgggagatgtatgctctcatgtcacaagaattactacaggcagccttgtgctgtctgagctttctttgctaccacatagagaaagtcttagaaacacagtgagacagaaggagagaaagagaaagacagagacaaacgctcaatcaaatcatgagagggcctgcagcaatcctcacaaccattaaaactagctgtatcctttgaatttttgagtttcaagatcctgcaaactgctattttgtttaagtcggcttaaattcagtttctattatttgcaactaaaggagaaaactctaatactgtatttcaccacatgaatattttcaatgttaaggaatataaaagaaatcttgatatgatgcaagttcactcttgcttacttactctttgctatctttatatttgattgacaacaagggactccaactgttgcttgttgctccactggggaaaatttatttattcattcattccttcgctcattcattcaacaaatgcttatttcacacccattaggtaccaggcacccacctaggttctaaagattcataactcaacagaatagacaaatgttctaccttcataaagcttacgatctggtgggatggagtcaacccttaattaataaataaataaaaatctaagtgtgctgaatagctacatgtgctacagagaaaaataatgcaggaatgaggatacagaaagtctgcacttgaggataggttttgattagttgtttttaaaaacagatggtcatgaaaggtcttattaagaaagtgatatttgagcaaaggcctgaaaaaaaatggagttccttactggggaaagtatgggtcctacaacagagaatagtaagtctcagctctgcagggtgcatggcaaattttccttacaggagttcacctagttacacaagagagaaactcccatgacaccccactagaacttttttctgctagctctctgagggaactgggcatatttgttctgtttcactgggcaaacagaaataggagttaggggtggctgtaggttccacgaatcattattattttcaatgttcactctctggcgtaaaggctgtgaggtgaattgctgactaattttataaagcacctggagctcctcagggcaaaggcactatgtcaacaccaacattaaataaatagcaataattggccaagtcctctggtggtataaggcaaataaaatatgttccctcttggaagttcatgacgtctgccaggttaagcaagaatgaggcaaagcacttttagaaagctactttttctaccattgtatatggcctccaaacagccagccactgtgaaatgttaagtgttcaacagcaaattaaaactgagtgtgtttttcattcactatcacaacaaggtactaaataaccacttgagatatttgttgtacgttatcattttccaggcagttttactgttagctagaaataagagtagagtgacattcgtttgattagagcagaaccattttccaccaatttttagagcacatgcaaatctctttagcaaaaggactttttcaagggttgaatctcttatagtttctcaatgtgaatgttaattaaagaaacctaccaaaaccaagaatgatttcaaatggttatagggtttcaaatggtagatgaaacatgaaaatatatataacctattaacaagatatatttgtgtctctaagaattctataggggaatatacatttcagtgaaactctgtacccacccaacccactccacagcaaaacaggcatttgtgagaaagcgctatatatatacacacaaacacacacatgtacacatgcacaatttataaataaacatcaggatgttaaatttaactaattttaactaaaacaagggatagctcaggataaacttggttttactctactaactccaaagttcaataaataataacaattttctcaaggttattaaccatcaatactcatagaattatgaaatatttttgctaaaagcatttagaactaatctagtatgattcctttatttcacagatgaagaaacgaagtgtcacagaggtctctttgctaggggtaatctatgtgctgaaaaccacctataacactttgaaccatacctgttgttggtattttgtgatgtccgtctacatgttttccttgaatgactatatattttttattataaaaatgggctctcattttatgtattttttattttttcatttaacataatgaaaatctaccatgttaaaaattatccttatgcatcagtatcctatcatacacatttaccttgataacatatcaaggtatattgtgctaattcccgctgctgaatatttggctcattttttttcttggcacattttcagttttccactataataaacattgatgtaactaaatcttttcacatattcttaatttttttcttaggataaattcttcaaagtaaaattgttggttcatagtgtgacttgaattctcttctagaaagctactcaaactttcactttcattgctaatgaataagaatgtcctgactttagtcaatacgctgaatttgttatcatctagttttgactttgttttttaatcttgaatactctttagagaaaatgttagttcactattgtttaatttgtatttctttaaagttggggttttattcatgtaactcaccaattgtgtttcttatggattgtgttcattttcctggaagaaaggtcatttttttccttattaatttctaagaatttttttttttttgagacagagtctcactctgtcgcccaggctgaagtgcagtggcatgactcagcttactgcaacctccgcctaccaggttcaagagattctcctatctcagcctcctaagtagctgggattacaggcacgtgccaccacacctggctaatttttgtattttttagtagagacggggtttcaccatgttggtcaggctggtctcaaactcctgacctcgtgatccacctgccccagcctcccaaagtgctgggattataggcgtgagccaccccacctggacgatttctaaggatttttaagacattaaagtcaatgtctctttagtaacactggaaatagaatcccacccttttcatttgcctttacgttttctttatggtgtttttgatgtgtagaaaaatttgattccttaatgtatacacatctatcagacattttcttcatgctttctcgctctagtgatatgcttagaaatatcctccctatgttgaaatttaaatactcatttttattttattttagtaattttaactaaactactttttagttgttacattaataaaattatatattatatattaatgaaatctttatttaaataaatatttaataaaatatatatccaatgtatatttttatataaggtttaaagaaagaatctaactttatattattttcccaaacgatagctgttgctttcaacaccatttattgaataatcatcccttttctcattgaataaaatgctacttcagtcacacacacacacacacacacacaaatacataaatgagtcttatttgaaatctatagtctatccaaatcaactttatctaattcttcatttgagccaccgtcctaattcttacaatattatatattacatgatatatgttactgtaatttttatgatataatctctggaatggtgtgttctacatccttccaacctttacccactgtgctttatttcaactttttcttgattttcccatgttagcttgatttttgaaatactttattaaaatcaaaaataaaatgtgattggaattgcctatagtggaatgaatattgtggattgtttagcattagttaagacatttttgttttcttcacaacaataccaaaaaaacccttctaatttcttattattttcactcataaatataggtgtagtatgtttttgtgactagaatcttgtgctatttaaaaagaattggccgggcacagtggttcacacctataatcccagcaccttgagaggtcaacacaggcggattgcttgagcccaggagtttgagaccagcctagggaacacagcaagaccccatctctacaaaaaatttttgaaaaactgtccaggggtggtggtggatgtctgtagacctagctactcaagaggctgaagcagaagaattgcttgagcctaggaggtgaaggttgcagtgagctgagattgtgccattgtactccagcctggacaacagtaagaaagtaagtaaataaagaggtattttatttttttcattataatatctaactgattattactttctataaaaaagctaatagctttcttatatgtaattttgtatttggctacctatctgaattactgaatcatttctaataacatttcaactaattcctttggctcttccaggtaaatacccacatagctataaagtcagttttcattttatattttatgtttcaagttgttgtactagaacaataacttgacaataactatacaacttcccaaacaaatattacatacaaatattatgttacgtcttattgcttataactaagctgactttaatagaaacgactcacacttaaaaattggtttcaccattgaaataaacactatattcttctgttgctatttcactgcatccttttaaaaaaaactaacaacaaatggatattaagttttagtcaaatgccactgtggcacctgtcaatacaagtctattgctttttctttcaccatattaatatgatggattctgtgaccagatttgatcaaaattaactatatgtacatttacagactcggccttatttgacatgagcatgaatcttttaacaaaatgcaagattcaatttaccaagttgtatttaagattttatctaccgaaaagtaagattggttgagggacttccttcttattgcaaataggtctacttgatagaatgaattgaaaagttgattttcttttcacaaactctagaaaatttatataacatactatttgttccttaaaagtttggaaacattttctcagaaagtctctgtgcctgacatcttttgaaggactgtttatttaaagcaatttttctaattttttttctgacagatatcgctttgtcaaggttatatacttcactttgtatcaaatgtggaaatatatatatttttgcaagaaggcacaatttaatcaggattgtctctctccctttccgtatgtacatgtttctgactcatcctaggcccctcactttccctcactcccatagaactgtttcaccaactgttaggtatgactgctgtctcattctctctcaccacagaaagctgggaaaggcattttaggaggtgagaaataaagcatcctctctcaagtttttgccatcccccaagagttatatgtggggtctccatgccaacagtccactcctctgagatggttttccctaatcacccgcaagtaacttttcacttttaactttaaaagagtgagcagggctccccttcctcataacctagctgcgaagcaatttaataggtgttccatgaaatttaaaagcagtagtaagattcctaacagagacactcctcaactttctccattctcacagcctgtctctagatatagggagttctttggaactaatttctgaaagaacacgtactttttcatattatataacattctaagccacattaaaatgaatgcttggtgagatttttcaagcagatatttaaattattgtatgccactgagaaagattaacagggcataataagctatacttaatattttaggaacgagtatagtaaactattgtttaataaatacaaggcaaggcaaacattacaaagtgaaatgtggaagaactaaagcttctaaaataattgaaccttccctctagcagcccctcacagagctctccgtcattaaccaggagtataaaaaatagagcaaagtatataatacaataatagctatagttttttgagctctggccacatacctggcataatgctagatgttatacacattagctttcttcctcagggcagccctaaggaaaaagagcaaaggagggctgatgtggtttatagctcccatatgccaggccccaggatggatgagtttgtaggaactagagtctcagatcctaagtccatagagttaggaagacacaattaataaggcaaagttcctgctcttgacattgtaccactgtttcaggtttgactcaactttttttctgaaaataatgattaactttttatagttgtttacagcctgccaggcactgttctaagaactttatatgtatcaacttctccttgaatcttcacaaccactttataaagtaagtatcatgatggcccccatccccctccattttttaggggagaaaattgaggcttaaagaagtggcctgcccacagatggcaagtgaccaggccagagtccacacccagactatttaactctagactccatttaactctagactctaagcttttaatcactaaactttcagaaatgtctaccaagaaagatggctaaatttggcgagcaatatctaaaatcaagtccaaaggaatatgaataaaagcatttgaaagagaaggctatgatttctcacactatgactagcatttttccttaggtgtcatctatgctgaatctccactgggcaggaaacacaatgaaatacaactgaaactgaatggaaagttaaccatgaaacgactggaggaatctcagtcagaactaggtctcgctttaccaagagaggtcagtcatacttgacaatagaggctttagggcccttttcgatgttccacaccataatttaaatgatgcagtaaaaacagaaaaagcaaagagttaataatcatctgaagaaatgtgcttccattctaaacttccaagggggttgggggtgtaagaagactaaatattgtggaaagcagcttggtgacatctgaaaaggctaaaaacagaactaccattcaactcagcagtcccattcctgggtatatacccaaaggaatataaataattctaccataaaggcacatgcacacatatgttcgttgtagcactattcaccatagcaaagacatggaatcaacctaaatgcccatcaatggcagattggataaagaaaatgtggtacaggtacataatggaatgctatacagtcatacaaaaatgcaatcatgtcctctgcaaaacgtggatggagctagaggcattatccttagcaaactaacgcaggaacacaaaaccaaatactgtatgctctcacttgtaagtgggagctaaataatgaaaatacatggacacaaagaggatcagcatactggggcctaccagagggtggagggtggtatgagggagacaaccagagaaaataactattgggtagtaggcttagttcctgggtgatgaaataatctgtacaacaaacccccatgacaggagcttacctatattaaaaaaaatctccatatgtacccctgaacctaaaataaaagttttgttttttaaaataagatgaaatgcatagggcaaaggtaaatctgtttgtggaaaaacagcaaaaggaagcactgtttcctggcaataagtataactcttttcttaaggtctgcccttctccttaccccgatctccaacttgttggaaagctaagattattgaccttctgtgaactctgtatctagttaacttctttcattcaaccctttagggactcaagcaaacagcatcactgacaccattgacagtttgggattccaaggtggctatgcaaattaatccctgtctcttgctccactcctaccctcatcactaatcctcacttctcctacaaaaggacattgttatgaagcatcctcgccttgttttcagcttgtgtgtttttgagccagagcttcattagaatatgaccatctgtgctccctgggaccttggtcacctcaatttatttgctggaagatgtggaatgatcctatttcacgtgaatatctagctcagtttcctctatttctctaaatgtatctcaatgtcttttgtgctttctggaaggtattagagtttatggaccttgctcttggttaacattaaaaaataagctttctacataatatagtgtaaaaaagctatgtcatttcttcacttttctgactactaagttctcttgagaggcagtgagtgtcacactgcactactagtggcctgcacatctgagacagagtatctcttacacacttgtgaattaattcctaacttctgtataatattctatttacattttttattcaaattctctctcattctctgtacatttctttagcacacactagatgtctgctgtgccaggtgactctcacttattcagcacagcaaccctaagagacacacacatttagtactgaaatattagagtggagagaacaatggtgaggcaatgaggttacatggtcacattcttaccttgggaattctgctttgctgtgaagcagtgggtaaagacattgactattacagcactcactgtttatccaaacagtatcccaggggagaatacatttcagggttctgtacgaggaaaacttagtctttcctgagaaatggatgttgtgttcttctcgtctagcatttcttttgttttcctgctaagtttggccaccacgtaactatgagatgggtttctgggctccttcagaggaagcactatgactcttattattgaaatattcactttctcttcacccaattttctctttttaacattctgaattaaaaaaaaattattgactttgtactttttgtaacttactgcaaatccttttctaaataggcagggcatgaataaagaaaggatggaaggatggaagggaggaagggaaggacaaaggaagaaagggagggtggcagggagaaaacaaaaacaagtaggcaaatacataaaatgacttaccttttgtaattttaaattattcaagtttgttttctaataaatataaccttaatgaaatgccatctctaaaaatcctttatacaaagcttttcaaataataaaaggaatacgagtaaaatgatgaaataaataaactttttgcagccaagaagtctatgatctaacgtttcttgttcactatctctcaaggttccccaagagtaaacatatgccataaggatttttgctaaatctagtcttaaaataggaactattctaaaattaaacttctacttttatccataaggccatttatatcattttaagcaatgttgtaacaactattggaaataccacatggtctggttttacataaatttgcaatgtatattatcctccatcaccccctacattggtatagaagcttgttccaatggtatcacatagtgagttttattttctggccaggttggcattttgagatctagaatctttatatgccacccctgccgccattgccgactggctgtgtgcctaaaagccagagacactgggcagggttaaagattgtggccaggtttttttttttccactttgtcaaatgtaaaaatacaatgatggtttgtagagtatacttcagaaataatttagtcagtaggtttatgtctaccaatatatatcctatgagttaatataagcagttcacactaacaactgtaggtgatgtatccttcttttagttgctgatactgtgagagaataaggcattttatttaattaaagaatgagctaaaatagcaatgtggaaatacagaaaataaatactgaaaccacacaatgctaaacatgaatcagcattcctatatttgtaagtgaagtcacctaaagggaagaaagtataaacagaaaaggcaataactgcatcagggaaaatgagaacctatggaaggaaaaagaccagcagtacctggattcagcttttctggttggaaaggtctagagacattaaaatcacacctgtttataaaattatgtatatttaatattggaatattattggtggctctagagggcatacacctggttgtacaggaaccgtaaggtttaacaatactactaaaaaaggaatgtttatagatttagatttattgcaaaccatgctttcattttttcttcctataaatctttcctgagcatctactatatattaagtgctactgtagctatggagatacaacaagacaataaatatgaacttttgttggagttcacattccagtcgaagggatatgaatattaaacaaaataaataggtaaattagaaggtatatcagaaaatgacaaggacaatagagaaaactttagcaggggagtctgggagtggggttagggattaaaactgcagttctcaatctaatggatagaaaatgttacattgaagtagctttggggtgaagccttgaaggaagtgagccacgcagataactgggtaaaagcatatcattctcttgtttagatataaatgtgctgagaaaaaaaaagtattttctatatataagactattcctctgaagcagtagcatgcagatgactgggaattgtagaagaggtgtcaatgccaacaatttgaagaaaaataacatattttaatgttgaaacaaatagagaaaagtaagggattgaagagatattttaaagagaaaactgaaggtgttaaaaatgtgcatctgataccataaatccaggctactcttccagacaccaggctcacatgttcaatttcttctggcatgaaaaattccagtggaaaaagtcaaagaagctcttatctcttcgctgaagcagtcatgctagggtaacagctgaattcaggaaaacttaaggaaactaactttcactgcactcatactatatgtaaaacatcatacacataatatgaatgtccaattttagaagtatttaaaaaacatggattttatatagctctaagccacatgaggtgtgtatgaggttgggggtagtgaagctcaaaattgtaagctagacacttcttgaaaaaaaaactaaatgcagccttcactaatggcaataggtagaaagagaaagagcatgagccagaaatactcatatttaaatcaaattatggctctgtgctctgtggtcatgaggaaactgcttaatatcatttacttcatttattaaatgagtctattagcaacaacacatgtcaaattcctaacatggtacctgtccatccttcaccttatgagattattaaattattaaattttgccttttgagcaaaaatattgatttattgaaaatacggcctaaaatatatgccaattatgctacttactataatagtttaacatacaacagcttgaaaatagtataattctttcttcacatgagccatgttatgatttccagtaatttgggacccactggtatgtgggattcattacaatgttcttcaaaattatttcatttattacatggactttgtttaaggaaacgaacagaaaaaaattaaatgtttgttttggagaagtttcatgctgttaacttcaaagcccctaagcctccagtggccctcttggatataagccacagatatgagcgtgaatgacgctggttgttctacatgaaacttcctgatgtgaaaacttttcacctataacctcaaaagtcagctatagctaatagctcatgagtatgtttccacaatactgaacattttgataaaatacactttaaagacttcctgattagaaaagattaaaaaaaaatgttttcctaggattatactggaaattttgagaagcttcttacagcactcaaaaagagttcttgtgtatttgttgttgtctggaacgacatcatcaaggatcaatcacattctttaagggctaagtacgttcacaaaatttccatttttctctccaaagcacatggaaataatttacatataaatgaagaaacatgccaccctttaaaaataccagtttcttgacatatagtccaatggattgctacaatttcaagtctttaatagattcaagttgaaaggaatggcatgtcatttgaaagcgtttccaaagcacaagggcagccttgttttgcaatgtttctgaaatatttggtttaggacatggcaccagagggcttggcagtgaatactccgaagaaatgtaaagtttaatcaatccatgaaaatcagtcccagatgtggcttacgagtgacaccatgtttttaaacataatctggcataaaaagttcaaaggtaatagatatcagaaatatattcctagtgataaaactgtaggtaaagtttatttaaacctttattatgaacccactacacgcattatctgttttatgtcttatagcatgtaaaaaggtgagaaaaacatactgtcctgaatatgctaccaatcaggtagatgaaagcacaaaaaaaacccattcattcattcactcactcattcattcaacaagtatgtattgaactccaattcagggttagatactcttttggcaccatgactgtgagatctggttcttgttctccgctatctctgcgacttttcatctttagtggggagaaaagacaggtaaacagttgattaaaacctagtaagaattaggttcaagttttcacaggatgtggtgaagctcagaggagagagcagagcactggtccagttctcaggtctggggcctggaggagaattgccaagggagatagagattgagcatagtcagggaagggtaatcccagcagataaagcaaactgtgtaaatacggggaaaagctagcaggaaacaggcaacaataaattcattgtttctggagacagtcttaatgggacatggcaaacagagagaggatactagtgagagagccaggtgctgcgttcctgatggccaaaaggtcttgttggagagtttgtattttatcttcagggatctggaaagccttgaaagatttcaatcaaaaagatatttaaaaacatgacagagtaagagaacactaagttcctcacttaaaagttatggcagacatttcaaaactgttcaccaatttccagttttcttcttccaaccccacaggaaaattgtacttccctgcctctttgaggttaacaaagttgcattgctttggaaaatgaaatatgatccacttttcggggtggaagcatttaattgtgacttctggaatctctaaccctttcttctgtcatggtgaaggtagacacctgtggtttatatggcggcattgcttttggcaatcacatggagactgctggcctgcggggttctcagatccacagtggggtcgtccgttattggagtattattttgcctaccatgactagtacacgtattcaagtaatggagatattcttataattaacaagctactagctctgatttgtaatttgctcaattagacaaagttaagtgtgttccttgttaaaagtattcacctgtctaaagtttcttgtcttagtaaagcaagtcaccgcttccagattttggaagtggtaattaacagcgttttgcttatggatttacttataattagtttttgtttttggaaatttgaaaaatgcaaagtttaaagaagagggtgtacatttattctaattacttttagaaagaagtagtacatcagtaatatggtctcagtgttaaaatattttaaaagggaccaggcatggtggctcacgcctgtaattccagcactttgggcagccgaggcaggcagatcacctgtggtcaggagtttgagaccagcctgaccaacatggcaaaaacccgtctctactaaaaattcaaaaaaattagccaggcatggtggcatatgcctgtaatcccagctatttgggaggctgaggccggagaattgcttgaacccgggaggcagatgttgcagtgagctgagatcgcaccactgcactccagcctgggcaacaagagtgaaacgctgtcaaaaaaaaaaaaaaaaattaaataaaatgtagattaactcctgaaagtgaatactgtacatgtttgcatgcattttattctttgtaccttgtgactgctggctacttactgccttcctcctgataccagtttttctctactgcatatgtcaataaatgtttagaaatgcttgaagaatacagagaaagcccaaagtgttttttgttttgttttgttttgttttgtttttttcagaaatgcatctaagtgtctccttacaaaatgagagaattcattgattagccattctttggacatgctcttaaacgtcctctaccagaaggaatttcatattcctatcacaaaagggaaattgcttattcttatgtttataacaccagatcttttatttgatatatactatgtgtatatattatacaaataagctctttataaaagataaccatgaaggaattatttcctgaaacggcaaaatataaatttgcctgtaaaatcagaatgccctagccaatcttttgagatttgaccaggatgatcctgtgggtaaggaaactaaccctttcaaattgcatgaaaattagaagacaaatgaagatgttgtgaatggaaattcatttccaaataaaccactgggataaaaatcattagaataatgctagtttcaaaatctatgtttttccgtctctttgtcactcacaattatttcaaatatgttcactttaaagtacagtatatatacctagttaggttgagtcatgttttagaaaaattccttagagtttgtttttaagcaaaacaggactgttttaaacaaagcagaaccttaacaggaaactgataacagtggccaagaaaagcatcttattttctattttctgtgtattagaaagaaaccctatttctcacttcctcatatggtaattatatctcggtggaattgaatcctcaggacaacagggcatgttattgtgagatattttacacctggcttaaccattctgtaaaatcagagatagtgactagcccagaggctctgtctcacttccttccggtgttgcttagctattgataaatattaaggtgcatgtgatttggctgctaaaatgaagaaaggatgtcagaaggctatcagtttgctgaatcaaacagcattgccacagggctccaagctggcagggcccctctgggcattgccaggtcaccaaggaagtggctgggtgaggtggcaacaggtgtcagacatgctgctgagcagatgatctcagcaggcctgaggacagaagagaaggttaccacacaaagtgcttagctgtgaccgcagaggaatttcagcatcaaaggaatttgagtagaaaaaggtttcaaatttcagttaacccagggttgaagcagcaggactcattgatagaaagagagaagcaaataaaagcccacactagttaacataactctcaaataagaatgcaattatctgcagccacagtagcccatggaaagatatccctaaccagtcattcagttgagacatagggacatcacctgggtggaaaggacccttacaggttgtgaaggaattataagtgaccattagtgagtggtcactatgtaccagacacagctgtaagtgctttatggccattaattcattccatcttcacaacaacactctgaggtaagtattcatatttgccttattgtacagaggtagaaatggaatcataaaaaagtgaagacatcagccctagctgatacagcaagtacagaggagagccagaatataaacctaagaagtctgtctgtataaaccatgctcttagccaccaagtttcaccatccctcacagggagaaaactgcagagcagaaaagttctggtcttactcctaagaagagatgcacattacatacatgaaaagataccaaacatgacaacatagaaaatgatggatgccaagtgagtgccaggaactatagagctgttgaaagagattcattgcaaaacaggttggaataagcaagacaaacttgagaagtggattctcacattgagtgtgaacaagcaggggcagtgtgatgtggaggaagggagcatgtactctacaggctttagcttcagaggggcttgggttcaaatcccagctctgccacttacaagtcatgtgagcttggggaagttacttattctttgttttctagttttcctatctgcagggatagaaaaatgctatttcaaaacactattcatgaagatcaagcaaaattagttataagcaggtctcagcatacttggtacaaggtacacatttaatatgtgtactattatccaactagggagagatagaaagggagcttcaggtgagaggaacagcataaaaaatgatccgcaaaagccagaaataaaacttctatgagctcagttcaagctgactgggtaggtaaatgtctgccatgaacttggaagtgagagagaatctcccttggacactcattaaggggcctcaaagccatgaagagttgccatgtggtccttccagtcaataaataattttgtccaaacacgagtggaagaaaaaattaagagacacccggatggggaaaacccattctctttttggtgagacaatctagccagaaggacactctcgccagctagagctctgcatatccaaacaagcacaggtaaagtggaagaactgaccagaagaggagaaaacatgaattaattaattaatcaaagaaacacctgtaaggttccaagtaggtggcaggtaggctgagtgttagtgtatccagtcaggcaggtggtgatgacaaagggcccccaggaaactcccatttgtgtgagtgagaaaggcaagaaaacagcatgcacaatgctacttgaggagcgatgtttgaaaaagtgatgcacaggttgcaggggatgcacagaaactagggatgcagcactggagtggggtgagaagcttccaagaagagacaagccttctgatgggtctcaaaggaagaggagggtctcaccaggcaaaggggttgggggacacattctagtcagaaggaacaccatggacaaaggttgatgaatgaagcagaatgatatctttaagaagctgcaaaacactttccaccaggagggtgcagctggggtgtggcacatgaggttgtgaaatcaggtcctaaagaggctggaagaatgtgtaggaaggagatgggctccgcttggctcttaggtctctgcagaaggaaagagaaggagaatgggacaggtggtgagactggaggcctgtacactatttagaaagttactgggccaggcacagtggataatgcctataatcccaacattttgggaggctgaaccaggaggatcgcttgagcccgggagatcaaaaccaacttgggcaacatggaaaaaccctatatttacaaaaaaataaaaaatgagccaggcatgttggtttgcacctgtagtcccacctacttgagaggctgaagtgggaggatgccttgagctcaggaggttaaggctacagtgagccataactgcaccactgtactccagtctggatgactgagtaaaaccctgtctacaaaaatgctctaaaacaacaaccaaaaaaacccagaaagttactgcatggagcccagaggagaaatagttgcagcatcactgggaggtgtgggtagtggggtgaaaaggctatggcgtaagcctggtgaggaaaggcaaagcacctgatgctccttggcttcaagtacagatggcaaagcaactgggcaaggaagtccctggacagatgctcaggatgattacagcttcagaatgctgaagtgcagctgtgcctatgttttcttcctcctgtcctctgccacactgtccttcgtcaccctctggggcacctcccctcatatgagaattgagaaatggagggagagtacatgagtagtggggagacaccaagacagcagagcatagtgaagagaggaggagaggggaagcaaaacttaaaagagactcaatgaaactgggagtgcttttgctaatgccactaggaaaaagaaatgtgaaaataaaattttatatataaatacaaacacatgcatatgagtgggtgggttaaactactataccacctcttagccagaatgatcttttctaattagattaggaaatgaaagtgttagaagactgaatgggtaacatttgaattttccttttgaaagatgggccatattttgactttagaggaaacacagatgggaagtgcattcttgatcttggaaatgttgtgatgatccatcactgtcagggtgaagtaaggatctttagcatggccaccagagccttatctcccacctctgtgcctgcctccaccctggctcttctgctgcctttatattaaacatttgttcattcaccacataaggttctctctcttgccttcttttcctggttaattcttactgatcctgcaaatcacagcctgaactactcatcctcagagaagacattcctgattttccctgaacagataaaaaaacccttcacagatttttgaaccctgtgtgtctttctcccgtagcatctgatccagtcacagtttcatgtgtgtgtgtgtgtgtgtgtgtgtgtgtgtgtgtgtgtgtgtgtgtgtgagagaatgagagagagagagaaagagaatttgattaatgcatgtcttccccagttaatcataaactccataggggcaagaaccatgtctgatttggcatctacgaatgagtgatgaatgcaaataatgtttggctatggggggatgaggtgtggccatgtaggaagatgatgtcagggtgtggtacaaggttaaggaagctgcagctaaaaaggatgccaacttaatctattttggccattttgtctaccctaagtattatgttcacactgtatttcttctttctggactaagaaaaaaaaaacatgtttgcttgtggggtctttttttccttctaaaatattagactgcaaacaaaggcactgttgggtagtatatttttgttagcacccaaggggaaatgactgtgttcttgggctctccaatttttacattacatgttttctacatgagctttcaacctaatgtaagaattaaatgcaaatttgaggcatatgaactattttatgcaagatcttaaaattgttttccttgggacgttcattgaaagtatggctcattactgaaaatctattcttcagtgtgttcctaaccatctagccacgtcaaaaaaagttgctttaatatctgaagccaaatcgctgctttcctttgtgattacaaggactctcttggtaaatcagagtatggccaatgtccagttgctaaaggtggaaactacaagttactattctccttaagttaccagcaagatacagtcaacatgtagttctttggtgtctgtcaagaaagtacagagatttataggtaaagaagtcaattttcttatcatagatatagttgtcatatggagagtatgctgattagaaataatgaaagcaagagataaacttaaattgtggaattatctgagaatttccattatccatgtcccaagttaactgcaaacaatataaagttgactatatcaatttttatgtacagaaaaacatttgggacacaaatacattttaaaatcttaagagtttgcagggtaaaaaacattttgggggaaaaataatttttctaagggtttgagaaaaattcagcttatatttatgtatttcaacttcagtaaggataaatggaacagcaccactggaattgaacaattaagtaagcaaatgatggatggtagtttttcactgttggagtggaagattatagataagcaagaggaagaagctagaatgacccatgtggtaatgagttagatttgaaaatatcagtatgaactaatgcttatctatctatcatctatctatttatgcttcctgattgttagatatgtgtacatacacaggttggtatacacaaatatatgtccttgctctgtcagccaagaaggccaaaaggaaatgacaacccaaaaacaatgaacacacctattgctcaaatcttggtttttaataccattttccaatgaaaggaacgtgtgctccttggagaaatggctgaatctatgatgaggaaggagttatattgttgataagcctcaagtattgtgtaatgctagaaaggatgaaagtgcatcaaaacaaaacaaacaaaaaacagaaaacaaaaccaccacaattgtggggatgtatcaaagggacacaagaaatagtacccaatggccaaagctggaacaatttcacagcacgattagtatgacagtagtggattataacctaagcataaaataaatatccatgagtccatactgatatacataaatgctgaataattaaatgagggagaataagcaaatcttctgtggagaagaattgcaaatattttatgtagattctctgccttcaaggagatggagtataacaccctcttaagtgtgggttgtttatcatgacttccttccaaagggtaggtatgaaaataataaaaataaggaaaaataatacatttatagtggaaaaacctgaccaaatccacctcgatcaggtgatcaaggttaacatctttagtcatgttgacagtgtgatggaaaaatggcacattaccctctgtggtctctctccccaaaacactaactacagtctaatcatgaaaaatcaatcagaaaattccaactgagagacattctacaaaatacctaatcagtactcctcaaaactgccaaggtaatgaaaaacaaggaaaatctgagaaaattctatagcaaagataaatgaaacacgagaactaaatgcaatgtggtatcctgagtggggccctggaatagaaaaaaagaaccttaggtaaaactaaggatatatgaatgaatagggactttaaataataataatgtaccaatactggttcattcattgtaacaaaagtatcatactcatataagactttaataaaaggcagtgggtgaggggtatatggaaactccctgcactatctttgccatttttctgcaaatctaaagctgttttaaaataaaatttatctttacaaagccctgaaagcctagaaatttaaagtaaactcgtacaatcaaatagtaaggcctaatcttactgacataagccaatatttaattttctaacccaaaatacaaactcttcttcacatgttaacctctatctccattttctatgtctacatttctttagaagaccataaatcacgctatattatcattaattagagccaagttaaaatgttaaaattgctaaacatatgactcatttaaacaaaggtttactaaaagacaggaaacaatttacaggaggtatgcattttctgcatggttgcatctttcaagaagacaaagaaagggattaagaatacctttgtcctaagatacaaaaaaaccacaaggcaaaaagtacgacatataaagttttacaccaaacaaaaaagagaaaaatttcagcaaatcaatgttatcatctacttatgattttttatcattgcaaacaacgcatgtttgtccatccttacttcgccacctggaccaatgcaggccatgtcatatgaaatgcctgttctgaccattagaacatccagactcattctggggcttaatctcttttactgcaggtgcatccacttgttatatttcagattagcagcctcaaagaactagcctcttcccagtacccatccttcaattactgcatcattttctctaacaattgcagtctttcaaccactttatatgtgacaaggcatgagcttgcttcctctcttgtcactctcctgagtcctcttctgtttgtctgcagcccaaaaggaagcacaatattccagctgaggtctgaatgatgcagggtcaagtgcattcattacctctttattttgggttattctggttctattaatacagcttaagatgttatgtgaaatttccaaaataggttccatattttaccttcaaaactgtatggcagacacaaatactacattatctgtgattaccgtgaatgaggttagcacattattatgtggttgtgaatatcatacttggcttcctggagaccgaatattcatgtatcagggccctcctgtgatgacacagtcagtggcgccctcacaagggcataccttctagccttgtcttattctttaaaaaaaacccacattctttctttgttctagctacacagctggaaaatcagaactgaacataatagtgggaagagagtactctttaatctcagtatttaatctcctgatactttctggacctctgaaagtattaatacatgcattcccatgagaaatattattgcttctctaataaataaggatgtcatacaaaattaacaaattaataattcaaggacacattcgggtgccaaagaatacagttttctaatttttacaggaaaatatgtaaagtaatataaaattttcacttgtaaatagtgcaaactgtgttagaaaaaaagacaatgcagatgagagatttccttgaaatgctcttaaaatcatgttattgatccgtgtaagtcagctatatcaattctactgatcaagaaataggtattttaaacacaatgctttcaggagtatacaatgttgacaaatatgcaaaaaaaaaaaaattgcaaaactccaagaaaatcaaataatgaatgctagccaaatttctatccgaactaagctaactcaatgatattatcgttgtctttaatggagaaacatgaataaggataatctttagtggacttagattaagtaatacaatgaatagctataaaatttgtggatcagaattagaagaggggaaaaacacattaatcaagtagacatgttaacaaaataatggattagtcaggattacatttgaataaattagcaaagcaaaagaaatacattaaatatctaatatttagtaacttagaagagaaaaaaatgctgtgtattttacatactaattcatacacatgcccaacaaataactaccgtttccagtcttcatgtgcaccataacatgtgtaacatatgaaacaaaaatttgctcctccctgatgtatattggtatgaaaatcttttaaggtaacatgagaatgaaagagattcttcttcatgctagacatagaggtttttaaacacatcatttggctgacgtaaagcacatttgcaataggcattagtaacctcaagttaagaacaatatatgccaggctgatgtactggacacttcctaaatactgtactcagcagttttggagcacttagcaatgatgaattggtgtgaagactcaggtactgaaaggtcatttccctttttttcttgaatcttttgcttgtcttgattgacgctctgaagaagccaaggatacagaaggggtggagaaagcacgcaacccaaattacccaaaggagctgcttataatgaacttgaatgaagatagattttggggagaggtgggggaaagtggccacaatcttcaatattcttttgaagtgttactgctttcaaagttgtgatttttctcaaggtaaagctgtttgacacagatagactcatctgtcaatcaaacatcttttactcatggccaggtcaaatacttgactattctagtagtggtatcaaactcttagtgccaatataaaacagccaactcacctagccagggaaaagaaataataagaaaatgaaaaagtgcactgagcctttatatcctgtattcaagaactgcatttcttttttatttagttgttttgtcattgctgtttatcagtttttgtttttgttgttttgttttatgatcaaatagttttagggggataatatataatagccatgtcacacatttctgaaagaacaacttatttcacctggccccataaatggaaatatttcataaattccagaagctttggcattcgtctacatcctctttccagactgcttgctatttcataatcattttcatgattctcattttccttatgaattgaatttgtgcttgaaacatttcaagcctagggaagcaatcttgtgagctgacagatcttattgggagcaaccttgttcagaattttgacttccacttccactcttacacaacaaatgtccacgtatagactcaacatttgcctcaaaaattcaagtctccttaagaattacaaaaggttgtatcaccctgtaagactgttgccattacagatggcataggactcaggattctaaaatctagtgctataatgggctataagttgggttaaagaagtgagaatgctgtgcttttaacttcaaaatttggcaagacataccattttttaataagaaacatattttttatttggattatccttttcttatactatctattttattatactttctttaatagtatttaatcagattttaatgaaatctggtacacaggttttttgttttgttttgttttgtttttgtttttgtttttgtttttgagacggagtcttgctctttcgcccaggccggactgcagtggcgctatctgggctcactgcaagctccgcctcccgggttcacgccattctcctgcctcagcatcccgagtagctgggactacaggcgcccgccaccacgcccagctaattttttgtatttttagtagagacggggcttcaccatattagccaagatggtctcgatctcctgacctcgtgatccacccgcctcggcctcccaaagtgctgggattacaggcgtgagccaccacgcccggccgctttcttttaattataaactaacaatagtatttacaattttcaaagaactttcaaatatactacaatcttccacagaaatccataggggaaaaaagggacaggagaggaactaaaatatatcaaacacactaagttgagcagataccatgatttatatatgtatatcattaatctttatgcacaacttaggacaaatttctttctgatcttagtatcataagtggtgtgcttccctgatccatcaaattgtttatccaatggacacggggatttgtgtttaagcttcctgatttaccctggatcctaggaagcttagtgagaactttacattccatcttgcatacccttggacttcatggtctgcttaactcttgaaagatggaaggccctctgcctcccttgagatctaaacaaaattgatttgaacttcctaatttcatgaccagtaagaatcccaaaactcacctctaaatttctgataatttcctaaaggctgggctcattgacctgctttgccaacacaacacagctcattttgattcacatgccaccaacaccatcaaaatcacttacttcaggtactcctgaggcttcaagtaagacatacatatattagtggtcttcccacccctagcaactccctgtaccctccccaatacccctcacccaccgaaccactgtcagtactggggagggatctgtttatggagtatacccgcagttctcagccttcccagggcgaattttcctcatcctgtcctctctcctaatttctctgcctcatctccatcattctcattggctctttagcactaaattcttcttctgttatgcagagaagttttcacccttagagcacttgagcacctacctatagtcagatcctcagggactttcttcctatcccaagggcacgttcaaaatagctcttctaggccagctgcagtgactcactcctgtaatcctagcactttgggaggctgagatgggtggatcacctggggtcaggagttcgagaccagccaggccaacatggtgaaaccccatctttactaaaaatacaaaaattagctgggtgtggcagcttgcatgcgtagtcccagcaactcgggaggctgagctaggagaaccgcttgaaactgggaggcagaggttgcagtgggatgacatcacaccactgcactccagcctggacaacaaagggagactctgtctcaaaaaaaaatatatatatatatatatatataaaaatatatatttatatatatttatatataaaaatatatatatttatatatatatttatatatataaatatatatttatatatatatataaatatatatttatatatatatatataaatatatatttatatatatatatatataaatatcttctagcaaagacatttttcttccttccccaagaggattctggtgccgtttgtaaaggtaatatatatatatatattttttaactattacatacatatgtgagtaggaacatcataccttatttctctttgcccttcatcaacattctccctataagttatgcacatataactttgttggttgtcttaaatgctgcctgggaaaagctgcggtttaaaaatgacaaattaaataatgtattatctcattgaatccttacagtaaatctgggtgattggaactgttctatttttctcttataaatgagttaagtgatgctcataaaaggtgatttgctcaaagttaaccagtcagcatcagagttgaatttgaacttggttcaatacagctttaaagcatgggatctttcccttgcattgtactactggttaagagagagaggtatgaaaccctcgaatgctttatcaaaatatacctgtcacttcctcttcctacccactcttcaacctccagattttcatactccttattactttccccccaacaaagtcttgcagttatttctgataaatgatacaactgccttccctaatgacattctccaatcctcaccatctccatcacactgagaactatggctttttaaaacattgaagttaatttttcaggatgttctctgacaaaactacatataatgatataaaatagttattgatactctttcataataaagtgagaataaaacctcattctatacatatatagtgtgattataaccactatactaaagaattgatatatttaaaaactcaaatataggatatgtatgctagaataatgagagaaattaattaacactgataatattaataaaaattatcatttctacaatgagactagaaaggaggaggccagatgaggcagagctttatgctgtattacatataatacaaagctagtacattttcttggcaagtgaagagatattagggagatgatttttagagcttagtttgacagtgaaagatgtataaaaagaacgaagagccacacgtagaggctggtctatgtctgaagaccacatcatgtactgtgatgaaaagtaattaaaatgaaacatcaatgttatagatgcagaaaggggcataatcaagcatcagagccagctgtggagataatttacagacttttatctcaccagcaagataaaacatacatatcttcaaggaaagaaagattcctatatgaaagtgaatgagctagttattagttttgaagaaatggtgtcttagataaggtgatttgtagcaatagcatttagattttacagatacacccagttcggcaggatggttgcttctacaaatccagttaaactctcccaagtgacagaaatcaagatatgtgggaattatttatgctcaagatgacaatttttatagaaacagtatctatccccccaaaaacatgggctatatcctaaaaacctgaaattaatattaaaagccgtaaattcccaggacacaattctggaaaagtaatgtttactctaaaatcattttattgagcacctactatgtgtcaggcactgtgctaagaacagagaatctaatgaagcagggcctgagtaagacagtcataaacagaaaatccatcctgtataaggtaggcactgactcaacatgggagggcacatcagtcgattcttgctgaggcttgagagatgaggaggtataaattatccctcataattcaaacttaacccaaggtattgtccctgtatttactgaacaagaatgtgatatagaagaggcagtttagacctccaagcaacctatagttaatgggtaagatctaggttggaagtggcctgccactgattaccctaggcaacctggttaaccattcacagctagttgcctaatctgtactataacaatatttattggatacttactgagtgacaggtgttctaagcactagactggttttctcatttaatcttcacagcaaccctatgcaatgagaactatttactgtccctatgttacagatcatggagaggttagataagtgacccaaggttgcacccttagtaagtagataacaagcccttgccacagacttgggggatgattaagtaaaatgatgtctataaaaaaattagtctatacttggaatggataacctgttaaatgtgatagttattatctgtattattttttatagcatacgaccctaccttatctcaaaacatagcacaataacattatttgaaaaatataaagttatttaattaaaatttcccctgacaatataatttttatttatcattcttttctgtacacataattatttattaagaaaaaatttaaaaagtacctattaagtacaacaccatgctgggtattgtggtataaagtagaaaaaagtagtcgaggtggctactgcaatgaatagaacagattataatgttaatacctggtctcaaaggctagcttggtctcagaaagttctttgaagcaaaaggttgtgtgcagtgaagatctcacagaatgtggtcaccctttcaaatgatgacatcctgaggcaacttagcattcaacctctctcaaaaatcaaatctggcacagattattttctaaaaaataggacttttcccacaaatattttcttcttttaaaattaacacacccaaaggtttaagactcaaatgccttactttaggacttgtaagaggtctctttcactgatctcaataccactacggttttctcaatttgcccactgtcacattgctagctttcctttcttctctagaacatcaagggactctccatcattacgccaattatttgttttaaacatagtgagcaacccaatgacaaggttcttaagattgaggacttcatatcatgttatttccttaaattaaatggaggatatatgaaaaaggaagggcctgagacctttatcaagagaagagttgggaagatatgagaaatgtataggttgcatatggaatatgttttctcaaatactgtggatatcagcattaacgggcataacgctgctgtcttccccatgaaaaaggctgccatttaaagttaggttttgtggagaaggaattaagcaaaatacccaaggtagacaggctaaggatattccataggagaggccaaatacttgagaaaagcatcagagctcagtcctggaggtgtttgttgatttatgtgtggtttctctgcattacctttaatggaagaacaattatgcctgaataagacagaaatgagtaaattaactaggtaagatataagatcatagatttttatagcaccttagtgatcagttaagtcaaccttctcattttcatatttagaaaagaaaaatatggagactcaagggagaggaagaatgaagttccctgacaagtgactaagacttttagaatcttatttagagttttagagccacagcaaaaattctacaaagcaagctctgtataaagtagtggtgagcactgaatgctgacaataatagcggaagctctgctgagatgattagaagagatgaaaggaattcataatattggctaaagtcacagtatcctccagggtttattctcatgacctagaaaattataaggctatttaataatatcccttaacttacatattttatttgtcattttctcctatttatcttggagacataaaagagaatttaaatgtataaatatttaaactgggttacatcagttctggttaaagtcatattatgtttccttatttccagtacatttctcagagactggtgacactttcaagtaagcttcatagcggttttgaagaaatttttgtaaaagcaggttacatatatatggatttgtgacattctaacataaaccacagaaaggttcctattaaaaagggagcaaagctgaatcattttggcttttcttcccactgtgatttttattcatttgaagataaaattcaaagcaaacatcttaaagcttctgtttgtcacccaagagttatttcaaggcagcacaggaaatctcacattttcaaaaaatcaggtcatgaaaatggaactgcaatctaattaatatgttcataaaacagtttccaccactaccaaataaaacaacaacaacaattaagatcaactctgtattctttggaatcccaagaaacacaatccataggagacattctcatcacaaaacagtttcaaatttaataattaagaattgtaacatttctgtcacatctctactcatttccctgacataatactttgtgtaaataatttctcaagtagagtaaaacgtcttttattgactggatatattcattcaacatcactgacctttttccaacttgtttgactgtcttgtactctctcttcaataacctttccaattccccctagtagctgttccatcatcttactaagctcctccacctgctcctccctggtcctctttctgagatgtgatcttgaattccatttaatacttcccagagaaaacacagggcataaaacaaaaactccctcaggctctccttccacctacctaatctccacattatctgcattctccctccttttcctccccctatcccagagggtgtcatgtccacaagtttcccagctctgtatcagaatatttccttagggacatgcttcctactcttaaaagtgcttggtgttcttcactagctactgtgtttttctcctctccttctcctctttcctcctcttcttctcctcctccttcgttcttaagcaaaattttgaaagaagtagtttgcacaacttttctctgcttttattacccctgaaatataacttacccccagacactcccttaaaccactctctgaagtattatcagtaactactaattcccaaatccatcaaatatattttcactttgaaacttaaggtatttggatcaagtcagttaagttgtttctccttctgactcctgtaacaacttgtatatatctatattaatatgctccatactatactgtaattatttgtttctgtggctgttctccagactagtttatgagtatctccaaggcaggactcttattacattcatctgggcatcccctatgaataaataactcagtgtgttccacctgttccaatataattcactaaccatgacatttttcagtaactcagaaattgggctattttatgattaaaatgcttctttggcaattggatctgatttcagataatactaatattctttacttgagcacaaaatgaagtttaaagacatacaattagttgaatattttgaagaaagtaataattatggcagcaaaacctaaaatgtggatgatcttttatttttggcaaagcattctcaaaaccatttcatctgtcacaaagtaaagctggagcccgtatcaaagcagggccagagataggcagtttgaacagggctcaacaatgccccgcagagatggtgaatagagctgaattcatctatgctccacacaccaagtgtgtacccagtgggaagagtgacttttgctttgaacagaggctctgtccattcaccaagtactgtagtttgcatttctacttcatctgttcaaagtgtgacacctttcctaatatatcgtccagagaggcactttttagtgaaaggatcctataggccacagtgaccttggaaacagagttcaccacaaattccttttaaatttctcattctgagaaaatacagaaagagctgctgacacagtctaagtataggtcattgttctaacattaaaaggaagagtttctcaaggaaaggctattcacattcagtaagcatcctacatacttagccaggctgctaaataacagggtaaatctgcttattttctctggtctactgctaatctaattttcaaaaagatccataaacaagagtgctaagtcatctgccacaagaacaatatggtggattaaaaatatattgggctctaaaatcaggccaggcctggttttgagtgggtcagcttccctagcaatagatatatgaactttcagcaagttatctaatctctgtgaacattaccttcctcatctgcaaacagggatttggataagaaattctcagaaagttatattgccattaaaggatgtaacttatgtgaaaacatatggcatgcagaggagtgctcaacagtgttgatctcttccatgaagtatatgatagttatacaagagattttggcatgtcattgtcaacattctaataaattcttcttttatttttttgagacagggtctttctgtcttgcccaggctggagtgcagtggcatgatcatggcttatcgtagcctcaaccttctgaattcaagagacactcccaccttagcctccctgagtaactgggaccacaggcatgaaccaccatgcccagctacctttaaaaaaatagagagagagacagggtctcactatgttgttcaggctggtctctaataaattgttattaccaatgtgctatgagattttctttaatagcctacttcttaacatgaagtgggtaaatatctgctgtaatagttttcaaaagtggtaaaaactcaaagagctttcagaaggtcacacaaaacattaacactccagaagctgaattagaaacctggagtgctttttttaaattatttttttttagtttatttatgtttccagccaatagcctgattatgtagactctagattatctatccttgaaatcatatatggagagatatatatgtataaattttacacaacataatccctagttgtaatatattgtcttgggtatgtttataggctggtacttctcaaacaactggaaacgtcacctaatagtccatcaagttataagcagttgcagcagttatggcttggagacatttttgagctattgcaaaaatgtggataatgctatagctagacagagtattaatgagcattaacgtttgtgggatatgattgaaagaggagagaaaaggatgagggatttttttaaaaaggaacattcgacctatggcaataaaaaactggttgtttagtttttttgggttcttctttgcatctcagaatttgaaactattttcaattttcctttacttgcctatttttctctgaacccaaatacctcaacattagtgtaagtaactcagtaatagtcaactaaaaggaagaagcaaaaaggagtggaaagtgaagaatttaaaagaagctaaaacatcatacattgttagtaaataattttcatatgatgaggaataatttcttatttttttccttttgtaagatttctaagacctccctggcttatgccactcagtcctttgaagatgtaacctcacagcgatttaaagtgcacaaactattttactacagcagaaaggctgctaggactaaagactatttttcatttccataagttgtaagcacattgatattactaataacaactttgctcctctatcatagcatacttaatcgaattatttttaaaaacactaaaacataaacatttgtaatttcatttttaaattccaaggtattactagaaaaaattaaggggcatacagctgatggcaacaaaagacagtaaaatagaaagccaagagaaaagttttatgtttaataggatcgatatctcatataatggaaaatctttgctacactatatctaaacctgaatttctgccttaaacaatggctgactttaacattgagccctagggatttgtgaacgagatgagtttgtataattatgagctccatctaaactttattggtcctaagtgtttacaagtaaattgtatttggccccaacaggaattcagaattaagctggcagtctggtatttatattttagaatttctgggttgttctgtaacccagaggaagagatgttaaagaagcaaggtcagctattacctgcaatttcactggaagacaagcagacactgcaataattttaagttaactaaaaggagcaaagctccattatcttacatgagacttgatacgtcatttccttcaacgtatacatagtcatcaaactcaatattgctcccaccccctaaaattctaataaaatataatgtattggtcagaacacatactctggaaaatgcacttctggattgagtttctgtaatttcaatgtatgaagaggagaaaaccttaaaagatgaaactctatgaggctagataggaaggattatcttttcattagaaggcaggccattctgactttctctgaatacgtattcattatattagtagatttaaacacatatacatgcaaattatgaacacatatatgaatatattatcaatatactgatttatatcttgcttcattccataaaggatttagatcaaaacagaataaaacagtatgagttagtttatgaattgaatgcttggtctatagaggaacaatcaaacaaataactttctagactaaaccttttagaaattgatacctggaaaaggacagtctaatgaaagaatttagggtcctagaagaaggaaaaagatgcctccatgttgagtgaaagtgccacagtcacctcattttgcctcttcactggagttacctctcagcatcacaaagacagtttaaaacatttagatgtcctacctttaaaaattaaaccctaagcaccaaataagcaaatcattaatcaccttccacaatcattaatcccaaatcttcctctggtgtcctcagaggggccctccatggcagcattccacagcctctcctagccagggcctttagcttctatcttccactgtccttttagccatgtgaatccatcattaaaaggatgcaaaggtatttaaataaaatgccctcctaaattgtttagctatgaaattcaattgcattcaacatagccttgatgtttctggcatgaaattatagtatttttacaaataagattataaaaagttgttatatatcttttaagtcaggcaaaaagctgaacatgttagtcacactgtgttaggtcattcatgttagaccctggcatgtgattccaggtcataatgcttctaaaggtcctcttaactgctgctacatgaaatttaaattcctagaaagctgacttgcatttcccttctttcaaccatgccatacttgttcctgaatgccaggctatctctccattctaacaactagccagaaggaaaaataagaagagctatatagtacttatctatccagtgaggcaaacccttatctttgtttggcttggcagtaaaaagactgaaaagtgtaatggaaagaagccttcgcaataaaatcctccagctaatatttctaatgtagcttcaaagaagaaacacacattcttcataccactcttttagcacggaaggggtagtgttctattaaaccaagtaataggaccacttattaactttaactcataactgataaagagtgaatttgtaatactattgctcaataatcaacacaccagccctagggcaggtggatgagagtacaagtaggaactctgtgcacaggcttctatttcaattactacttctggtaaaatttgaagactaccctagacctcctgtgtctcagctttttctcattcttgcttctcaaaaagcaggacagaaagaggaccagcacatgccaagtcccgcctctccaaagggtacagagcctttctagagatgagctagggctcgtgaaaccaaagcacatatgtcttttacaatgtttattattccttagcactggcctgttgccaacttctgatcggtcccttcacgaagaaaaggctctaaatgtgagaatgaggatagggggagtctttggagatgaaaagagcaatttggcgagacctttattctaagcacgataattcacgagcctgaaatctcaccctataggggctcttacagtaggacaaagggaaagagggttttctgtcaacaaacccctacaatctcttactgcagtactggaaggggaggctataaataagaggaaaacaacaaccattgagaaagtcaagaaccaagcacaaaattaattaggtcacctggaaaaaaaccaccaccttcttcctttgagtccaacatcatattaatgaatccctgcaaggggcccaggaagagtaggagttatacagagcattaacattctacattggcttagtttggccacaacaacaacaacagattggtacgacatgcagtgaagcagatgaagggttacctaactccaggcacaaaagaaaaccaacaggactctcaacttctccatacagctttcaaacatatgtattacagatctagaggagcatgaataagcaaatttgcattctttccaaaacttcagagttgaatagcttatttctttccagtcaaaagtataggtgaggctaatgcaataaaaataaaaagtgcttataattgcaggcattcaaagagtacatggatcctatgtattacaacataaacaaatgggcttaaacagcagaacttaggtagaacaaaaactgttgctttgtagcaaggtacacttgatagaaaggagactggtaatttcccctcccaagcaaatcttaagaggtataaaatgaactctgaagaaaagcctaaggcatagaagaaaaataattgacaaatgcctactacgtgccaggaactgtttccaggatcttttaatctcaagattaaagactattgatgtaaatttgtctgtaagaataatgaggaccttattgctgatgcctgaccctcaccaacagaacaagcaaggcaatggcaccaaggctccccctgactaggaaactctggtgatgcagttggaagtgggccaccgaggtttgcaggcatgtcacccaagcattctagagactggggatagtagctctggtcagcaaaaaaggtagatacgccacagcatcgactctggatggatctggtgttgttagaaaataagcacctgcctagagtgggagaggatgcctcccatccttctctgcaatggattttttagctgaaagccgaaaactctgtaacaaaccagcaggtgattttggtggtaccttaagctctcagggagctttcatttgagacattgtcataaaagcagctggaaagccctccgaaacctatatttaggtatctattattcatccagagtccagccagaacatttacctgaaagatatactttcaaaatcagacaaactgcatttccaaaacaacccatgttagcagacactaagccttaacatgtgcctttattatgcattcacaaagtttctgctatgaaagtcagaatccagctgaccctaaaggtatggcaaaaacaagcaattttaaaataatgaccttttgctcttataaataccctcagcaatgagttcctacacacatttagtcataaactccagcaagaaatggcacatgatatcacatgtccagggacctgaatgcattgcattgaaccttaatagatgaccaaatatcaaggcactaagcaagttctatgagagcctgagcacttcctgattcatatgttagaattctactagaattctactggttcattctggtagaaatatttcttgaatagctaaaatatccttaactgtgaggcaccaacacattttagcattattttaaaattgagtcaacattctaagtttcccttaaccttcttttagaaattcagacaaattgatatatcagaaattcatgtgtgcccttccccagggaattttcaaataaaaatagcaaaacaacaaaaaacaaaccctaagcctcatctttaaaaaaatttattaaattgttgccattctcaaagtttttttcttcctccatgaaatattagcaatttaaatgttctcaagtcctcatgcttgacttatttggggatgcttcatattaacaaagtatttttattgcataaccattactttctcagacaatattcggttttgcacagtttacttttcattctcacttgataccaatactctagttcaagacaaatcctcatctggtacctgtcacggaatttgataattctgagttttacaaactgaagggaatattgattactcaccatatccaggaatgccttctaaagggaaaattattcacgtgcatcatgttcgcagatcttctgtcattaatatttttcttgtctcctacgttacatgtagtgatttttacagatgaattccaactctcttgtttgagcagctatcgtgggcaattattgcaacaagtattgaatcccaaaaaaaaaaaaaaaatctccccccaccaataaaaacaaatagcaattacaaaaggccttccaggatttgaaaaaagaaacatcacagagcactgcaggtatgggtccatccatttaggttccactagttagtcaacatactaaaataaccagttcaactaataatcctaaatggtggcaaatattgtcctggtaaaatctaaccgccttgagtgtaaattaatgcatccttaaggaaggactctggaatgtgggaagaaaggagtcaaaagacagtttcttgatatccttgttaaagaagtgttagaagggaaatggaaaacttcaggttgctttgccatgctgtcctttagaaatgaatattgctttttcttctttcttaggcacatattcatgtatggtcactttaacgcagtgctaccgtctgagacgtgtcggacaaaggcctgggcagaggggctagaaaccatgtatcaccaaagccaacttctttcccagatttcagaattgctggttcaactgcaaaagtaggaaggcaatgagtaatttctgctctgcaggacaagattaccattaactaccatcatgacttcagaagatgctgtcacgatgaaattcatttctgctgcctaaccccataataaggctggctgttctctttaagtaaaatgactaagctattgatcttttcactgcagaatcccctttattttgttattatcaaaaccatgtgggagcttttcatattttgccttggaaagaaaatgaatttcacagctgcaagtcagacgttgtctaagaattcttcccccgatgtctttcttttcttttttttcctctctcaatctcttttgtttttcaccccaaattcagttttccaataggtgtcatttattctgatgctctgacatcttctgaaagattctcatgcccaagctatacagaccttgcatgcttttaaaacacaatggcaacaggctcctgctggagtcccccagcgccgaatttccagcagaacctttggaatcctcgcagccgccttgtctgccctgggctgtgccgccccagctctgatcagctcaggacacttgcaggctccgtggtactgtacattaactctgcagcagcctggctcagctgcagagactgctgcctgacaggggatgtgctggcgtcaagggggccctctaggtgggttcccagacattgcagagccgcgcactccttgctaacctccaagtaagagcaagcaaaaggggttaaaggaatagctcgccctggaagagcagacttctttcagtaattaccaggcaagaaaagctaaacaaggagaagcctgtaaaacacctcacagggaaattacgccttaaacaaatacggagggaggattttttgtttgctcgttttccttcttacccagtgaaaaaaaaagaaataaaagaagtccagagataatttgcaaatgatagagtttggtggatttcactccttaaaaaaaaagcaccggggtggggaagccttgtttacttgatgatttgtaaccatttagctgcagatgaccacatggtgatttttggacaggaaatcctatggaagccggttctgcagaagtcagttgtacttcaattgcaattgcgcatgccataaaactgcttgtttgattagggggtgtgtagatatgaggaatgctgagataaaacgttgcaatccctatcactgatgttttgcatttcttcatgcttgctcctttgttgcaaaaattctgttcaataatcccccaaaagcaccccatcactgttgatgccattttggagcaagaataaaatagtaaactcttgtaatagtaggttggcacttaaatggtatttgtttgaaatcagtgggagaatggactttgcagtagaagtacactcaacattaatataccacttttaacttaggtatttaaaaaggcttttacgcaattgcttgatattaaatggaataccggcaacatttaatataacatgctattatcttcatttaggatttccccagtgaggtcctgtcattgcagaaaatattacccaagattgggtggagggcatgtcccataaattcaaaacctagtataaagaaaactaatcttaaaaaccaccataatttggagaattttcattttgatcaaaagatgatcctaaaaggaggattcctaggaggaagaagaactgggtgattccttaaaagcaatgtgaacttgtaggttcagaaagatgccactacagcataaaagaatcttgagaatatttgttgagatttcctgtagcctaggcagtgtcctcatgacccctttttgctaaagggactaaatctcttccataaggtcatttgtaatctggcccagaaaacttcagcctacattgtttttaacaagctttgaatgttttgaatcaagtaattaaaattttgatattatattagacatttaaatattattatttaagagctaggaacatctacaatgccccaggtcccattctaagatagttacagtattaccccatttaatccacacaacagcactatgagttaaggactgttactagccctgttctccagatgaggctattgaggcactcagatgttaagtagcatgtctgaggttaaatatctagtgagtcactatctgaatcaaggaagtctggctccagagcctgtacacattaccacaatattctagcacctctgtaatcataataataccaccttgttatacttttatactttctaaaatattattgttatatgtattattttggcatcacagaattatgctgaggagattaagacatttattatgcccattttggagatgccaaaaagattgtatttgttcattatcaggcatcttgtgagcagtagatctggaagagaattcaaattatttgactctggttagtgatctttgatcatgatgatgataatgatgggttttaattattttaaaactaacattcagtccttatacaagagagtaggtctccatagaaagtagcaaatgcaaagattttttaaaaagatgtaaaaatatattttcctttgtaatgaacatcatttatctgacattattttcttagtccattttattctactctgttcatatgtcaaaccatcacctatgggtgataggatagtaagaatacctctgaatctttctccactaccacacagttcaacattcaatacttgttagctacatttccatttgcgggcaatgatataagcaaagcactttataaataaaatacaaatgatttggccattaaactactaaatatacttaaactaagaggacattttagctgaatatttttaaagtgaattttcgttggatttttatttttatacatgcaactgtctagaataaagtctaacaaattagaacaaaaggaaacacaactgagaaactatgataaataacagaaaagccaaatttctgcttgaaagatagcaaagaaaaaactgtaatttatttcacagttcagagaatcaagactacacattattaaacaatccaaaattgaatatttttgcagacataaggcaacaaatataaaagaataggcttgcttagaaaatagaaataactcatttccagcattttattccatttatattagaaagagggtcttaagagttatgtctactaatttataggctgatactttacaaatttaatacttcctacatgtatggccttcaagaaacaacagttaggcagaactaataggtttgtaatctaaaaacaagttgtcaaaaatgaaaaaatgttgttgggttagggtaatgctaatctattttgttacactaaaagataatcatcctttcatgaaacttttaagaaatatcaggaagccagttctggttgctcatgcctgtagtcctagctacttggaaggctgatgcaggaggataacttgagcccatttcaagaccaggctgggaaacatagactctgtctctaaaaaaattaaaaagaaatatcaggagtaaccataaaagattatctttatggctaatctcagccccattatttttatcaatacaggagtgcgaattattagcagggcaccacaaattggcataacctcagtgaagtccctgcagctatggcataacctcagctctactagagcaaagactggtttgttgttttgttttgtgtttttttttaaattttaatcccacagcaagcacaagagtaagtgaacttatattaactacccttaaatgaggctgattcaataaaaagctcaattaattgataaactacaaactcagagcaaaccaaaatactttcaacattttcattgaaagatcgcttaatgcatccagaatcagagccagaagtattaactagccggtgtcccacgtccttttccaataaaacccttttctctcatggttatagggttatgctcataagagtgaaggttttcaaactaagtttctgggaaccctatggtttttcaaagttgcatcaggtcagctgaggggcaaggtactttgtgctgggtctaggaagccaggtactttgtgctgtttcaacaagagctcttctgctttaactagttttatctcaaagtttgataatacatacaaaaaaagtctggctctttaaaaaaaattacaaaaatgtaacagtagaaatacagaattaatactttctacacaaattcttatctctgtaatatcagtttcagtatttcatcctcttaaaatgccttcaacttacacacttccttcacaatgagcataaaagaatgattaagttcaacctttatgctagtataagcatagtataataaagtcacaccctagttcctgaggttgggtatttcctagactctttagtcacttgtacttatcagagggtgtgatgagttacttcattgattttccctgagtttcactttcagaaagtaactttaatgtcaaatgttaaggtatatttttttgtcatcattgcattttggtataatcaatagctaatgtcaatgtttgcctcttaaataacttgatgaaataaaactcctgtatatttagacatcaaagaataaagacctaaaagatgacttatttatcttatatgaataccaataatcagttcagatatttttggaaagtctccattctttcaagaggctggattacttttgtcccttagatgtcaaaaacaaaacacttggtccctgtattctacatattgggttcatataaatatatttacacatacaaaaacttctatgtacttttcttagcacattctatatactattaataacagtataaatacattatacacaaggatatagaagctactgtcacctggatatcttgcaggatgtgactttttgcctcaagctccccccataaatatatattttttaccaataaaaaataaaatttacatgagttttcacatgtgtgtatgtatgtgtaattatacatttttttctttttattgcatatatcatcaactaataaagaggtgagtgtgccatcagaatgagacctgaggtggctgtgcttccaaccccacctcccagcaagaaaagaacattcaagaccaaattctctatctcacctttacagaaagccaatcccccaggaacagaacagtgtcttcttctctatatttataacaccaaaaacattgttggtactcagtcaatgttaactaataacgatgttgatagtcatgactttccactcctggcaagttctagcaaagtctgaaggcatgctgttctgaacatttataactgaaatacgagaagcctttcatgaagccgcagtttcagttgctgagagtcagggaaatgcatcatgtttcagcaagttgctagtagctactacattcaatttctacatattctcataacccagggtacaatcaccaattagaaaagaaaaaataaattcattaaacacctagtttcatcacctaaaaccagcaaatgctttgttgggacttttcatgattcaactaatataaaaagccattttggatcatactcctcaaggttaaatcttctaatcttaaatgataaattcttttacagaagaaaaatctcataatatgaaatatatttcataattggaatatttagaatgcttgttaaattttacttttaattttttttttggaagtagaagacttaaaagcctaatactgaaatacaaagaaggcacttaatatttatacttaagaatcaaaagtggaaaaatgttcacagcaagtttaaagacaaaaaagtcaaatgtgtataccatcttggagtcctaagatgtgaacccttattttcaggttctgccttttactttttgtgtaattttgaccaacgcatgaaacctctgtgagacacaatttccttatccgtagcatggaagtaatacaaacacttagattattataattttaacttattataatttaaaattttttaataagaagagctctttaaatgttgtttgcatatacctttaaaatttgcttagtaaaatataataaaatacagatcatttgttttgcaatttactggaatcaaaatggaaaaaaaagaaaaaatacaaataatgtaatgtcaaaactaccttctgaaatggaattacatttcatttatatcttaagcttttctaaaggctttgtataatatttgtttagaaaattcaaaggagcaaaaatatttctcatgtaataaaataaagcccaacttcaaaacttactcatattatcagctgggcatggtggttcgcacctgtaatggctctcaaaaaaaaaaaaaaaagagaaatgttgtaagaatgcacacttattctttcatttatcctgattagatgtatccaaaatagatttgctttcactggaaatttaattgattgttactgattgataatttaattaaacttctgatgacagttcttctatcactcaacctcccagtaaaaaagtaacataatccagctttcagttcctcacataaggagcttggaagttgccaatctgtcctaacaacaaaaaagctgaacaaactgaaaaatcaactcttcttagatccataagagaagtgaggtcacagggcaaactgctgcccaaaccactggtgagatagacagtaggctatggagaatcacaacataccggagcagaaacctccaagagaaccagtgctggggtagaaaaacctcaactataattgacaaatcgttagaggctgagtgcaggcaagtctgaaagttgaaaaactccagaggaacccagtaatagggaggtccccacaattctgtgtgttttacctccaggagtgctaccaagttctcacagtaaatattggagaaaaattctctcatgcttccagcaagagaagggaaaaagtacacatctttaaatctgctgaagcttggttcttcctgaggagaaactagttaatcagagcctaacctgctggggttttttgttccattttgttttgttatattagagcctcactgacctggggaaagaaaaatgcccaactccagcccactctagcctaccatcaaggagaaaggaaatactcaattccagcccacgttagccattctctctcacctatggtataagaaaaaaaaaacctgaaaaacacttaggagattcacaatccagaggcccaggctcaccaaaagtctgaaacctaattatggaatgatagaaagcttcccctccactgccccttaccacaccaccacccacataacttttttattttatttatttatttatttatttatttatttatttatttatttatttggcagagtttcgttcttgtagctcaggctggaatgcagtggcacaatcttggctcactgcaacttccgcctcccgggttcaagcaattctcctgcctcagcctccccagtagctaggattagaggtatgtgtcaccatgactggctaattttcgtgttttcagtagagatgaggttttaccacattggccatgctggtctcaacctcctgacctcaggtgatccacctgcttccacctcccaaagtgctgggattaccaggcatgagccaccatgcctggcccacccatataacttaaggcctatttacaggagttccttttatccagtacatgcccagctatgaagaaaaaattacaatgcatagttaaaggcaaagaacacagtttaaagagacagaagaggcatcagaactagacatgccagagatgttggaattatccgtatgatacaaaaatggaagatatacatcaatataaatttgtgcaaacccatagaatatacaatactaagagtaaattctaatgtaagctatatgttttagagataatgatgtatcaatgtaggttcaattgtaaaaaaaaatgtaccacttttgtgggggggatattgataatggggtggctatgcatgtgtgggggttggagtaaatggaatatctctggacctttctgtgaattttgctgtgaacctaaaaatgctttaaaaaataaagtttttacaaagttacatgacaagcattaacattttatacccagaatatgtacaatttttatacaatttcaaatttatggatgctaaaattgctatttgtaatgtcaatagattccattttctttacaattgcttgaagcaaagatgtaattttatcaagaatgtttaacacatattttgacaatctatttataaaatctgaaacttatcacatagtttcattttaactagattcaatatcatttaaagtttctttttaaagaggaaacattatttcatttaggaaaccatgcaagttcaacatgggaaatacaaaaataaaataaaataaacacacaagaaagaagcaagtcatccataattccattcccaaaagacaagtcagtatacttctttccagtcttcctcccctccaggaatagtgggtttaccaccgatttttatgttgttgtaagaatatttcaccgacctctgaatttggtaaaaagtactgcctggaaaagaactcttttatttgccagatggcacatggtaaagaaattaccatgaaaatactcaaacctctccactctcacaggtttactggggaaggcagttcaatcagatggggcttacaaaagttattattctctttaaaactcttgtgatgaatttttaccagtagatgatctcaagagggtattcctctggatgtttctattcttaactctttagttttgatccacctttaggtctgcttgtatatttctttttaaaaatcttaagtagtatatcgctgcatatactactacagtagtaggacatagtagatgtattgtatggtccaggtaaaactaagaaattattcttcctacttttagaatggaatacaatgtgtggtccaccatatatattgtcaatctaatttaacgcttctttaatattctgccagtactggtttttagtgctttttaaaaattatatatatatatatttttgcagtgttttcagtcactttaataggaagctggaagaggctgcatcagaggctgcaggtaaaatgccatttaaaatccaaaggccccatccaccacttctaacccatgcacatatataattacacatcattggcagttaacagagttaggtataaaagcaaatatgactatgttatttacaaatacatatatttgtatatatttataacatatgtatattacatatatatatacagacacatatatgaaacattaaaaatgaaaatatttcatttagaaaaccatgcaagttcaacacgagaaatacaaaaaaaaaaagaaacacacaaggaagacacatatacatgtatttttatttcggcatcttgaattgactacgcagagacattgccactccatttttaagttatttttgaaatagatgactaaagattatcatcagcatgtagtggggtacatgctctaggggtagtggggttttctggtctgttttgtccttggtatatcctctaatgcctagaatagtatctggtgcataataaggactcagagtccttattatcttgacattgactttgttaagtattttattatcataaatatttaataaatgagtctctataccaaacatgattacttatgtctgcctatgtttccttctaaagaccttgcctttcctacacttcaccattataaaatctgatgggaataagcatgataacttgactcactgacatctgattcatttactaggcagcaaatattaatatttgctctttggaatgtgaaatgtcctaagtgaaattgagactctaatcagttcaaggtggggttgaaccaaaatgtcctgtagactcaggggctgaagttaccattttgggttcagtgcaaactgataactaaagagacagtggcaattacagggagaaggcaggaaagaacagaaacacagagacaaaaagaaatcggtgattgtatggccccaaagagagtagctgccttaatttcagttttcctaatccaataggccctgctatacttgtttctgttaatttctgtatcttcatagtaactatgttcccccttttctacaggagctagtctgagtcagcttctttttttgcaatcaacattgtgatgagtcatcatataagaaaccttatgttgctattcataaattatttccttccctcctgaaataaagtcatttaaaattaatgctatattgtaatattgaatagctacaatgaatgaacttgacattgaattaatggttacatgatcaagtggcttaaattaaaatgcacagagtggcgttaacaatgtatctacatctacatccacatctagatgttctggagactgttctttttctctgactgacatctattacacttccaatcaaaatactagcttctcattttctcgaaccccttttcacagttttcttcattaaatgtcagtttgtttcagataaggagaggtgagagagagagaaagagagagagagagagattttggaaaaaaaagaaatactgtgatatttttagatttatagagagaataatttagtactcaaaaggcagaattcctttttaggaaaaaaaggatattcagataaattttttcaaataatcatttgaaagcttaaaaatataaaaatgtatttaaactagaacccaataatttagaataattaatagtttcaaagtcactgtagtataattaagtagaataatctttgcattcaagtgtagaataaattcaaggctagttattaaatactagttgcccattgtggacagatgccctctcattcacctagcattttacacactcttccttgctgtttttaacattctgactcgagggtgaatctataatgctgagcacttgaaacttttaactcgcctacctctctctataattggcatattccattcctaaaaaaatcgcaatagactatataaatcacttaataggcacaacaaagcaaaacatgaacaatacacgtcccaaactgatgagacacaaaactattaatgtgaaactgaattgcctagctctgtatcttatacttttctctctgggaagcacatttgaaatgtgggaaataattcaatggggaatataatgtgattttatctgttgtttttagttccaagatttgtaaaatacataaagacacaaaagagctttaaaattttccacaaaataaagtagcaaacctgatcaaatagtaaattcatttttaagatttctcctcttttctcactgaccctccctttccctttagattagcaatcaaacagggactggagcaaaaataaaaagcaggaagtgggcaacatagcacatgacaaaaaaggattttgttgtcagaatcctcagcacgttttattgatgtttgaaattcccaactcattttcaaaatgaaaatgctacaggaagcaggaacaaagttaatgaaaatataaatgcacttttctcctcgtcttccataaccactcactgattagaggcacagtccatttgagatgaggctgctgcctgtgtgtgtgggagggttgaatattttttgctctgggaggagcaactgtgatagccccaaatccctgacagcctctcttcatagactgcaggtctagtgtgcaggtgatagtgctaaactcccagtccaagggagtctaaaggaggaagccgtgaagaaaaaggaaagtgaaacagtggactaggacagaaggacattactattaatactaattttcagccagtgcagtggctcacacatgtaatcccggtgctttgcaaggctgaggcaagaggatcctttgagcccaggagttcaaggctgcagtgggtgacaaaatgaaaccctgtctctagcaatataaaaaataaaaatcctaactttcccattccccccagtgacctgctgttttccacaccttgaatgcacatctcttttgggatccatttgctggagcagaggtgttttaaagatcagaagcatatttgctaggaggcataaataattttcccctcaaatattagagtaagaaaggggaagcacgcaagaaagatacaaatatgatatggtattgtcaaggtagttaaaaatatttgtaaatggatatcaatattgtaacatatttgctgaaaatgaggacatgtagtagatagcaaaatgctgttttttgctttttctttttttttttttgagctcttgttgcccaggctggagtgcaatggcgcaatcttggctcactgcaacctctgcctcccaggtttgagtgattctgctaccttagcctcccaaagagctgggattacaggcaccaccaccacacccagctatttttatttatttatttattttttttttatttttagtagagatggagtttcaccatgttggctaggctggtcttgaactcctgacctcaggtgatccgcccaccttggtctcccaaagtgtaaaacacattttatttgctttcaaactgtccctttaaactttatttataaagaacatcttatgacttttctgggtactgttaggcaatagagacctttgcattcatgctaaaccatcatctcagactctatccagaaattagaatgtccatttcaaattgtaacccaaaactctaaacttgattgaacttacattttctcccctctcccagctgggcccaccacagagtctctgtgtgcagtggagtaagtgggtggcattgagactgggttgctcttccccttccttggctatccaggctggctagccgttggtattgactcctctgggattggaaggcacagaaagtggtgaggaaaggaagaaaagagttttgttttgttttcctgaattagtgccatcgtaagatggcatcacatgttggagacctggcagatgttgaaagctgcctctttgtctcatggtacttttgtgggttcataattggtatccctgctgggtcctctggctgcaactcctttgactcaagcaagagccttgttttccaattgctgctgattaaccagcacccccatcaaggccttggttttctagtggttccatccctaccaactcttgctcttggagccaaactggctttcccagatggtcctcttgggaaggacatcaaatggctgaaggccaggtctctctttgagcttaatgtgagttagataactgcagcccgctttaagagagggtagggttggactcacggcactactcagttctctctctcttaaaaatatatcttcacaagttcttgctcaggcatgaaagggtgcattttctgcctttggtcctggtgtctggctatgactgtccatcctgtgtaaatgaggagagtaagtctgagcaaaaggacaaagtgctaagatggcaaagcagaacctgggtgatgtgtttgaacctcttaataacctaccctggaatagcctaccttgaaaattcatgttataagacagtacattttcctcatttgtttttgttaagccattaagttgggggctccagacttgcaaccaaaggcatcttaacttaagaagtttaccataaatatttattataacccacacaaggggatgtctcagtaggtaatccagttagacagcagaggaagtttatgtttcctcacttttcttcttctttccaagtagctggtgggtgagctcatctgctacaaaacacacttcaaaataagatctttaagttaattttcaaattgaaattgctattattgaaacaacagttgtgatagcacctgcgataacaaatgtaaataaaaacaaataaaagctatgctcaatttgtggacccatcatttctcagtaggcttggatctctagagttcatggggagacccaagaggtttctaatattacaatgtattaccaatatccagggcaacaatcacatttcatcttagaaaatcagaagatgatgtatgtgccaaaaacctttggaaattgaattgtgctttatgctgaattctgtttggaggatctagcaaggacccattttactgttccatcctatgatgtgggtgtgcttatattaaatcactttcagagaaacactaggtgactaatttgtgacaatgatatgtttgcagactaacacattcgtaagaacagcagaataatgagctaatttgtaacgtaccagatggaatgtactgaaagctagtggcctaagctatcataattgtcctttataatccaagaagtcatttctagtaatcttgctacccacaacattgtttttatataaacaggtcacagtagaactaatcctcttcccgtgaaggcaggcctctgttatttcagtgtgcttgcaactggggagctgctgcagtgtgtggttctggtttgctttttttttttttaactcctatgtctgaatggcaccctataatgagggatcattaatcttaactgttctgtagcccatgtcattgttgttattttcttttgaagttgtttcttccgtaatttacacacatttaggtatattcaaatttatacttgaactgtctttctttttcctctatgtttgtgtgttccagctcactgaaataggaactgaatcctcagcacttttgagactgcccatcccaaatcaatccagtgattactttaaccttcttatcattagtctcactccctctcctttcgtgctcaaccaaaacttgagatttataaatctgaaccccaatttcagctctttctccattacatctcctcagagccccaagtgtaaactagctaacttgtactgctaggttaatagaaatttttctaaaagaataactaatatcaattttcctcaaactctttcaaaaacttgatggggtggaatacttccaaactcattttacgaatctagcattgccctgataccaaagccagagaaggacactacaaaaaaagaaaactacaggccaaagtttctgatgaatatagatgcaaaaatcctcaacaaactagccaactgaatttaaaaacacaataaaaagactgttcaccatgatcaagtgggattcatcctagggatgcaaggatggctcaacacacacaaatcaatacatgtaatatatcacattaacagaacaaaggacgaaaactatatcatcatttcaatagacgcagaaaaagcacttgacaaaattgaacatcctttcataataaaaacccctcaacaaattaagtatagaaggaatgtacttcaacaagcaaaggccatatatgacaaacacatagttaacaccatacttaacaaggaaaagttgaaagcttttcctttaagatccagagcaagaaaagatggccactcttgccacttctattcattataatagaaattgcagtatacaaaatcaacatacaaaaatcagtagtgttgatatacactagcagcgaactatctgaaaaagaaatttttaaaatcccatttataatagttacaaagctgtataacattaaagatgacacaaatgaatgcaaagatagttcgtgttcatagattggaggaattaatattaaaatgtccatatctgaaacaatctacaaaacaatctacagattcattataagccctatcaaaattccaataccattcttcacagaaacagaaaaaaacaatactaaatttcatatggaaccacaaaagacattaaatatccaactcaaccttgagcaaaaagaacaatgccaaaggcatcacattacctgacttcaaaatacacaacaaagttgtagtaaccaaaacagcatcgtacttacataaaaacagacatatagaccaatgaaacataatagagagccagaaataaacccctacatctacagtgaacttattttcaacaaaggtgccaagaacatacattggggaaacacaatctcttcaataaatggtgctgggaaaactgtatatccacatgcagaagaataaatataaacctttatctcataccatatataaaaatcaacctatagtggatgaaagacataaatgtaagaataggggaaaagctatatgacactgatttaggcaatgattttttgaacatgactccaaaaccaaaggcaacaaaagccaaaatagacaagattgcatcaagctaaaaagcttctgcacaacaaaggaaataatcaactgagtgaagagacagcctacagattaggagaaaatatttacaagctatacctctaataaggaatttgtatccaaaaatataagaaactcaaacaactcaatggcaagaaaataaccttattgaaaaatgggcaaaggaactaaaaagacatttttcaaaagacttacaaatggccaacagacatatgaaaaactattccacatcactaatcatcagaaaaatgcatactaatactacaatgagctatcacttcatacttgttagaatggctattatcagaaagtcaaaagatattaagtgttggcaagaatgtggagaaaagagaacccttgtacactgttgatgggaatgtaaattagtacagccattataaaaaatagtatggaggttctttgaataattaaaaatagaactaccatatgatccagcaatcccactactaggtatatatccagataaatcctgcatgatctcattcatatgggaaatttaaaacagttgagctcatagaactagagattagaatggtaattaccaggggctggggcaactggaaatggaggtgcaagtgtgatattgatcaaaggaaacaaaatttcagttagataagaaaaataagttcaagaaatctattgtacaatatggtgattctagtcaataacaatatgttgtattcttgaaaaatgttaacagagtggatattaagtgttttcatcacaaaaataaccatgtgagttaatgcatgttaattttctagatttagtcagtctacaatgtatatatacttcaaaacatcatgttgtaaatgataaatacacaattttattggacagttaagaatatagatataattttaaaatttacttagatgtatatcaagacatgccatatgtttgaatacagtcttgtaaaaacagtttttctgaagaaagcgtggttttctggaaggagcacaggcttttagtatcatcggacagacctgagtctcttattaccactttatttacttagtctcatttcccaaccttaaccaaatcttaattttttcgtctggaaaacaatgatacatatctcctagatttcttcaggattacattagaaggtatagattaaatcatgtagcacatgcaagtactcaatgcatagttgtttcccttgattcctcagatgtttgccatttaacctgctgactgcaatggtgagaatgttaaattagggaagcaagaaaacagcagtgtagaaataggagaaggatgaataacataagcttctaagaagcaattattaatgcaacgtaagctgggagggtcgactgtaaacagccatggtatggttttggtatcatttgccttaaggagagtctataaattagagtaagaccaataacccagaagaaaaatgggacatggatgcaaataaccatcacagaaggggaactataaatagtcaaaagccatttgaaaagatcttcaatctcactgataaccaaaaataaatcaaactacaatgaggtattttgcctatcacattcgtttaagattttttttaaaagactaaaaatatgcagattgtgagggggtgggaaacagtacacccatacacagttgttagaaacatggattaggagagacattttggagtacaatttagcaaatttttaaaaatgtaaaccatacataccatttcagaacaattacatttgtaagagtttatcctacaaaaatgattgctcaagtgcacacaaacatacacacacatacacacattcattttggcactgtttataagaccaacaaaacaacaacaaaagtctgtttctttctctctgaccagatattaaattcctggggagaaggtcagacctttctacctcctccccagtaacttccaaacccgtaaacatgtaacagggttgaaggtgcttaaaactgcatattggctgacaaaacatcagaatatttttattatgtataaagacaattatatagatttataaaatttgtaactgacttgctatttccaaaggtgaaaataagtattcaataattggcaatgcaaaagtttatttttttctatccattggaaatttgtgaacattttacacaataattgagttttatcaactttccaaatataagtatttcttatttgtatttcagataataaatttgttatttctagagacttaaagtatttaaagaaaatcaaaacatcccatcaaacacaattttgttcttaagtctctctttcttcttttattctccaaccctgcctcccatggtatatacaaagctttgctttgctgccagactttctctaacatctaaaaagtgtagaaagcaccgttattataggctaaaattgatctcatttatcccaggagtaccaacattctcaaacaggggttcaaactcctgttactataattcttgggcctgttatttcaatgagaatctaattttcttgcaataacaaatggggagatgggagacagtgtcttccaattacaaagaccatgctcctgatattatcagcaaagcgtacctctgggtcactttcaccagaagcaggtttgggccttagttacaccctctggaccaaagtgatgtgaatttaagtgtatttgttagtgaactgtctgatctgggctatggaacagactaaatggaactaatccatctaaacgggaaactcattagacaggtagtcagcctaacttggctactttattacagatagatccaatattaaaaataagatccaatatttaaaaataaaatagtaccttctttttcagggagaactatactaaataagaacagttgatatacatatattcatatgtagatgcagacatatatagatatatacatatgtatatacatgaatatacatgaagtaagagtgttacagtattctcagagcaatgtgctaggaaaacaccctttcatctatgtgaaccccagatcaactcgtataaattctgtatttgtatgtttctagcactataaattgagctgagcttctcaaaagaatacattgtattaactaaaggaattcaattaataattagcaaagaaactaatcagctttcttccacataccatttagaaacatgcaacagcacattggaaatggcagcaggaggagagtgaaataaagttaatattttttcaagtctgtcttctggggaagactttgtgcattgagacttagacaagttatttcctttaatacaataaccttataaagcatgtactaatattccccagtttatagatgatgaatctgaggaacctggagaggttaagttacttgcccatggacctggagagtaaatggctgagctgtgcttggacaccaaaacctacctttgcccaccatactgggagaccagaattgtcctgtggattcggagaaggctggacaggactggttggaggggatgcaattatggaaagagtagatggagtaataaagaacataaccttcgtaagtagtaaatgccaggcactgtgctcaatacttgacttgcctttcctcatttaatcttccacaaaagtactactagtttgtccactttacagtgaggaaaacaaagcacagaatagttaagcaaatcacccaaagttacacagccagttagcaagtcttacaattaattcataatattatttcattgtttattttccccatattcatctctctttttgttttctatttctttcttacagaagggggggaaggggacatgttttataatttactgatttcatatacctttggaagttttagtgccttttggttaaaaagtaaccaatatttttccctacgtttcagatgccaagaggctatttagagatattgggaggcactttactgacgttctgcttatgtcaacagatacgcgtagaattaggctgtaatttgattcctaaccctattgatgacttcctaaaccctcatcaaaaacattttgttttagttccccatatgcaaaatcaaaataaagaggtgtctttgtttaaaaatgctaatatatgatttggcaaaggctgacattttatcttgtctccttggctgctgttttaggattattcatctagcactgactgagtgcccagcatccatgcccctcccctttcctatttattatcaggctgctgcagtgcagcgttgaaacatctgatcatttagatcattaaaaatcaatccaatgaccaaatagttctgtacgttttagagaaatgacagaaagtgcagtattagattgctattaacttgctctggggttttctttttacagctgccaggaaagtcatttggtaaaattgattaaaccagcatgccaaggaggagagcggaaaagagcagagaaatgcaaacacagtgagcttggaggggagggcaatgtttttcttgggaatgaagtgagatgtcagtagaggaggcagcagggggtaggtgggaggagaaaccttgcatatagtgagcatactataattagaggtacaagagattcaagatggtaggatacaaggaaccacaatgcggaaacaataaaggaaggaagaaggaatgaaaaggaagcaagctatccatgcgcttctaacatactgtctgcattggttacactgcacagtttgtctgaattaatccaagagacatcactggtacaataagaagaagctgatttgaggatttccatagataaggctctttcaatagcaggagtaggtagggaagagtgcctagtttcctacacagtgtggtttatttctgtaagaacaattaatgaagaaaagaaaataaacctctctacttgtgctcaataggacgatgagtgcataaaaattcacacatgccttcccctaatttgttattatagtggccatacatattccttccctccaaataggaactgtgttccccttacagaattgcatttctcctttaacacgtttcaacaattttttgattaatccgaaaagaaccctggtatgtgaaatcagagagtgctgacaaggatggattttaatgtggggtttctgccactttgcctctatttctaattcctccctatgtcctatttaaagtcacacttagctcacacagcgcatgcttctagagaagaggataagcaaaaccatcaagaatttatttgctgtgtattatgtctgctaacatttcaagtataacaaccacctaaacacaagggacttaaaaacagcattaaaactttaaaaataaagaaaatattctgtggatgagtgcatgtatttccttggatattggacattgaaaatgataagacacaagaaccatttaattgcataggagaacaccaacactagtctaaatgaagtaacccccttgagagaagttttaaattgcatttaccctgtcctgggtatgctacttggaagaagctatgatttagacagcaatttttggcagccaagatttacataagagtaagtagccttcttgaatgagagtggcagccagcttccatgaagtctcccacctcctggcatttaacatacatctttgtagagtccccctcccactctatcccaggattggttatcagacagcagtgatgacatgtcactttcaagaagagattatgaaagactgtgtttgacttctgtcttgggatgtctctgtcttttgtctccgtctctgtctgcctatctgtctctctcatctctcactctgggggatacaagctataatactgtggttagccctatagagaggcccacatggcaaggagttgaggctttccaacaactatatgagtcactgaggaagcagctgagccttgagatgactgtagcccaagccaacaactcgtgagagacccttagccagaaccactaattaatatagagaaatactgagcaatttacatgattgaagatcatatgtagagagatatgtcataaaaggcaggattggatgggaagtagaaggatatagatgcaaaacttcaaggaagaaggtgtactcatcattggtgctattcgtcaccattctcagttctccctctttaaggcacatggcaagattgcactttcttgcccctttgaagttaggcatggtaaccttactttggcaaataaaatgtgagcagcatgagaaacacgtatatctctctaatttgtatatgtacacacacacacacacacacacatatatatatgtagttaatctgaatatcactatgatttgatgaaacaagacaaaaaagaaaaaagatatgtgagcagaagcaatacgtgtcacttctgggggaaaccactgaggtctgtgtatgaagtgccctgtcttctgccacaatgactgggaactttcccgactgtggtgtctcccattaactgtgttcctaagtgaagagcagaaccctctccctccaccacaaacctgtcatgaacatgtagcttgagtgagaaataagcctctactcttctaagcaactgagcttttggtgttgttcctgtagcccattctcactaaaacagaaaatgggtctctgactaagaattcactctacagaaaaaaggaatctggtatgaataacccgaacctcagccacaaactctgagcttcctgaaaggtgtagtggttcttggcagattgtggtgactggcatatgaactctcctaatcatatcccggaaatacaaagagttgtgtggagaactgaaagaacttttttcactagattcctagaatttgagagctccagaagcagcacagctgttggcttcccctgagagagcaagaagggagatgtactctcctttctactctgcaggtgaatagtgttctggtactgccctagatacaacagagaacattcatagctggaacaaactggttggtgtctgccgttaggcaatcaagagactaatgaacatgggtcaaggtcactggtagagcagagaccagtacaaagtgacatcctgggcagatccatgcaggggcaattgcaaggcaccccccagagtctcagagatgctaagtgaaagaggttgtgtgagttactgaggtttatgctggagaatatgagcatagagctattgagactggagaactgattttaatgtgacctaatttatatctaccagcttgaagattaaacatctaaaaccctattacttcattactaattaattatgtgtttgttacaataatctatctgacatcacactgtatcatgtggcattatatggttccaccttgatcagctttcaactcaagaatttaaaatcctcttcaccaggatcttattttggtctagaacagattaatctattctcaactgccacatgtttttagacactatacaaataacattttaaaatgttcattgattcaaagcttagtggcttacaattcagtgcaaaaagacatgggcaatgaagcaaagatgtgagcagttcagctgaattaacattttgagtatatgcacattagtcctttggatgggatcatgcctcaaacccattgaaatacacctcaatgaaacaataagtaaacgagggggaaaaggagactacatgaggttttgagtggtgaagacatgaagtctgtaaggctatggagaataattaaatgtgatatttatatttcaaaataggtaaaacttgataatggcagaaggtaaggagtcagtggagaaaaacagaaaatgctggcagaaagaaacaggggctaggggtacaaggtctcttagaaagtgggaagaaatgggatctagaccacaaatctggatgtccttacagaggattcacatacaaatcttattcaaatacatcatggattcgtactgaaccttcagggtagattttaatgacaacctggttgtcttagtccattcaggctgctataacaaaatacctgagtagattagaaatagcagaaatttattgctgacagtcctagaagctaagaagtccaagatgaaggcatcagcagattggatatctggtgatggtttacttccttgttgatggacaactatctattcactgcaagctcacaaggctcaaggggaaaaggatctaggcttctttcataagggcactaatcccatttgtaagaaccctgccctcatgacttaatgacctcccaaagccccacttcctaataccatgatattgggggtgaggatttcaaaacaagaattttgggaggacacaagcagtcagatgatagccctggtttaacccatatggctcatgttctctcccctagcacccttgtatttccccttgtaacactcatcacaacctgcacttgtatattcatttatctgtctgaatgcccgtctccacactaggatacaaacttcttaagggcagggtttacatctgctgtggtcactgttacacaatctccctagcacagtgcctggtacacagtaaatgttccataaatattaatatttgtggattgatcaaatcaggatagacacaagaacaaatttaagattacttagcttattgtcccaatctcactttggcccaccttactttgtcacttaaatgaagtcctagaatgaactgtggcccagtagtccttatacctttgtaaaacttcattgatattgagggatttcaatccagttttgataatatagcagccaaatctatccacatcactaaagccaatcagccagactgtcattcttactctgatgctatttagaatgtgcaatgagccaccggattccacttcctaaaaactaatttccctagagcttctgctctcttattttatcaatgcccctgaggtcagaaactatgattttgtctctcctgaacagcacaatgtctcattaaaacttcttcctataagcttgagtttttctttagaactgcaaggaagtttcaaggatcatgaaggacctttggtttgatatcagctatttttagtgctttgagagcaacagcacagtcaagttcactaatgacctaaaaacaattaattcaatatatattctgattccttgattgacactgttttttttgtttgtttgtttgttttagatttggaaaaaaattactgcttgttcaatcttttaaaaatggatgttctaatttttttttttacagattccaacaaccaagttggattatcgtatttgaatataaatatgggcaagtctgacaatccaataatttatattttatatagcctgcttctacctaaggagaggaagatagacagtaattatttatctattcaacaaatttttattgactgccaccatatgctaagaacaactctaaaggccagggatatagcagtgaactatgaaataactagggctcttgagtcgtggtaggagagatgaaaaataaacaaaaagaaaaagtgaaatctatataaggattatatgataacagtttgcagggagaacaatttaaaaagaagaggggatggggaatgccaggaacaggcatggtgaagatataattattaaaaacaaaataaaaggatagcctcactctgaagatatccaaataaaggatggaaagaggtgaggaaagaaaacaatggcatatcaggctgatgcaagttctggctgaaggacttgagaacatgaagtacctgaagcaggactttgcttggatagttgtgggaatggaaggagaccagagtgactggaccagaggaggaggagtaggagctgaatctgagaggccacaggaaaaaatagtagattattataaagaccttcaatttcattttgaggaaaatcagaagttactgaagtattctgagcaaagaagtgacctaatgccacctagactggagcagcctcactctgctgaggggtgcaaaacaggctgaagcagggacactggtcaggaggtggtgcagcaacacaggtgggaaagttggtggccggaaccaagctggttgccatggtgatggtgagaaatgggcaaattctgggttatattttgaaagaatgctggctggatttgctgattggattggaattgggagtgtgaggaaaaaaagagtcaaagacaacaacaaagtttggtctgagatcaggaaggctccaggaggagcaagtttgctgggaaagagcaatactttggttttggacatgctcagtttcaggtatagaggagacatcatggtggaaatgacaggaaggcagttgaatatgaaagtctgtatcaggtgagagatccagatcggtagagacttgacaaacaatggcatatagactttgaagtcttgtgattagatgaggtgtaagagatacgcagaaggaggacagaagactgcaaggactaagcttgggacatgtccatgctaagactttggaaagctgaggaggatgcagcaaaggaggatgcagagtcctcaagggaaaagggggaaagccaggggaatgagatgccttgagaccctggggaagagagttgtcttctctaaatggtaggtattcagcatcagtgtagagacacctgctttgtaatatttatttggtcatgggattcacatgccttgacttacacataggttaacattaaatttaatttgcatattttggagaattgaccaatttataagagagaaacaagaggaaagaacaaatgccagaacttatgaaatcttcaagattaactgattacatatcagtaaaccaaaattacattacattaagactgccgttaaattaatttagtaatgcttcaccatgaagattatcttaatatttggctcaatttttaaaaaaaacttttttcttaatttttttacaaaaaaatttttctataactcaaaaaaatattttgagttacagtttacacattaagggggaagccattctccattcacatattcccatatattatataagttgaacttttttccaggcaactgcataatttaagtaagttctgacccatttcttagtcactgccctgactggacttgacctgactggggagcacacattgagttcaaagaacactctgctctgacattagccccataggaataggccactttaaaatgcaaatatgtaaaattaagaaggaagataattatattggagtaagcatcttattttggagaaaaattagaactgaattttatgccaatgataatattcaagctttgtattatcatagaaattatgattttgttttatcttttaactaaaaccaaagtcaaagatttcttacaagtatgagaaaagtgaatttaaaaataaaatagagctatatgagatatgtgcagcattgcttctattattgcatacaatcatagctcagaactgtaagagtctatgttactacacataaagcaacaatatacaaacttctatgtaattgtattttccccttttagaaatggagagaataccaatcctgtttacctaatcagacaagattatgtattttaaagcattttaaaaactatagaatatcgcacaacaccaacggagtaattcagtgtgactttcctttaatggatgaaaagttttaaagcactagttattcttcagttggtaggaaggcatttatctgtaaattgatacatcctcaggcaactgtgctgatattcaaatttagttattcaaaatgtggctttcatttttttttttttttggtggtagggtctctctctatcatctagacctgagtgcagtggcacagtctcggttctgcaacctccacctctcaggctcaagcaattctcaggcctcagcctcctgagtagctgagactacaggcacgcactaccacacccagctaatttttgtattttttgtagagacagggttttgccatgttgctcaggctggtctcaaactcttgagctcaagcgatctgcaggcctcgacctcccaaactgctgggattacaggcatgagccaccacgcctggctgggatatttttatgttgaacattcccattctagccatgcgcttcttacctggacttcattaatatatatatacatatgttagaccagcattttgaggttagaaatcatgaatcaaacagtaaggtttcctgggatatattagacaaaacaaaattgaaccctggtatgtttgaattgggagtagtcctggtacactatgactttctggttcagagataaaagccttaaatggcctcttaaactttaaggattcttagccattcaatatctccctatgccattttgatgagactagtgtaaatgaatcataggcacatagattaaattcccccacgaaatactcatgactatgaaacatttaagaaaaagtgggtaaagagtcaaatatgttttgctgactcctcaatattttcaagatggacacagacacagtcagcacattcaaaacaagctaacagtgaccaaaagtgtctgcatttgctcttatatcaccagtctttatgtcttcttcaattgtgaggaagaaaagctcttcaacaatacagttcacatttcagtctcagtagctggggtaatctgatctcctgattttactctaggcttactttgaatgtgaccctagtaagtttaaaattctttatactgcctaccttacactcctgactagctagttagctaaatagaaatgagggttagaccaaaagaggactatcttacagcgaagtataggtctaggcagttttctatctatttagtgaattattacagaagtcctcaaaatggccttctaggagtctagaaaaagtaaacgtattttccataagcatccacaatctgtctttttttttttcaattatactttaagttttagggtacatgtgcacaatgtgcaggttagttacatatgtatacatgtgccatgttggtgtgctgcacccattaactcgtcatttaacactaggtatatctcctaatgctatccctccccccttcccccaccccacaacaggccctggtgtgtgatgttccccttcctgtgtccatgtgtcttagtagtaaaaccaagaaataatctcatctgattttaatgcaaattacacccatttccaaacatgctggctttttaaaacaatattttttattaagatttacaatggaatttcaaaaatgcagccatttacactaggttgattcttatttcactttatgtacatgagtggtttttcagctttaaagttttaaagaattcagctcagtattttggtgtttcagcactttctattttgaaaatgagccaaatattgatgtggtcagatctatgatccctcaaaccattaaaagttataactctgtgataaatataatgtagcagtgttccaaattggcaactcatattaagtttaagaataggaattacctacaaaaaatttccaagtcaccatatatctgtctctgtgataatgtcatgctccctagcgatgctctcaaatggtagaatgagtcactggcccttgtcttttcaaattttatccatgaaaataaaagtaaactgctaaagataatctagaattttgtactctagcaggtttcaaatataattgcttctgtgttttttggtataaagttgctcccatggagattataattctgatttttttcctattctatgcatttcaagagctaaaataagtgtgggaaaggatatctatatatatctatacctctatacgtattccaactaagatagtgaagggtttaactttgtgtattacttagacctaataattacatatatatatatatatatatatatatatctccaagattttaaagtattaggtaataagtgcacataagatttcgtactttttgtcgttttcttcttttaaattatgcatcagattttcttgtctccaattgctgagggtgtatcttctcttcttatttgctatcaacattatgactaaaaatatatcctccaacatgtctaaaagtcttattttagataggtggatttcaaaccttgctttgcttatgggtaaattaggcaaagagagggtgctgtggtggaggagctccatcgtcctccatcttcaaccttgaagagctcaatttggaaaccagtgtggtagccctgtatagtgaaagtcatttactaacttctcttccatggcaaccacagtaaatattatgctacaatgtggactctaaaataagagattaaaagctaatattgatctatgaatgtatgacaataatagcaccacgaataaacccaagtccaacactttattgcgtctcccccagaaatcatgtgttgaagtcctaactcctcgtacgtgagaatgtgaccttactggaaataggattgttgcaggtatgattcattaagtgaagatgaggacatattgcaagagagtaggtccctaatccagtgtgcctcacgcctttataaaaagaacaccatgtgaagagacaaacacgtacacagaaggaacactatgtgaagactggatggatgctgctacaagcaaaggaactaccagaagctacaagagagaactggaacagttccttccctagctcctttacagggagcatggccctgccaacacctcgatcgtagaattctcacctccataactgtgagacaacacatttctgtttaaaccactctgtttctagtactttgtttcagcagaaaactcatacaccactcattcctcaattttctgcattctgacttcaactcctaccataccaatgaagtgcttttcactaagtagtggcctcttttcaagtcagtcagctcattctacttctagcttttcaactactgactttccctttataaagcctctcttgatcattattttctgatttttttttttactaacagttctgaatactcctcatttcattccttcaacaatcattgagagtttatgtgtcatgtaaaaaaaagaattcttcgatgcctaaaagtttctatgttaaaggaacataaagttgggtgggagagagaagtaaatcaatgagtagattttcattgtacacagtatgagaataaacaggaagccctcttaagcccattctacaggtttaggcagacatccttttaaaagatgatatatcagatatgagctggaacatgaggaggagttaccttgacaggaatggaagatgtaagacctgagccaagaggaagagggtgttctaggcaaaaacagcaaagaaacaaaggctcagagacaagagagaatcatgaacgccagagaattgtgatgaaaactgtgtgcagaatgaaagagaggacctgacaaaagaacagaacaggcgtcgggttctgatgggccatatatgccatgttacagcttggcctctattctgaaagcaacagatagtcactgaaaagtcttaagcaggaaatatatattatcatatttatcctctagaaaaaaatgttctgagcattgtgtgaaaaacagattagtgggagtaagcaaagccaaacacagaggatacagtcaggaggtggtggtaatatttcagaagacagatgatggtggctgctatggtttgaatgtttctccccttccaaaactcatattgaaatttaatagtcattgtaacagtattaagaggtgggacctttaagaggtaattaggtcatgagggctccaccctcatgggaggcattggtgcccttataagggcaagttcagtcccttcttgctctctcctgccctctcactttccgccatatgatgtcacaacaagaaagccctcgcaagatgctggcacgttgatattggactttccagcttccagactgtaagaaatgagtttctgttcattataaattacccagttttaggtattttgttatagcaacacagactgacttagcttaacctaaagtaatacccatgtatataaaaaactttggagaatactagaggtgaaactgatatgacttgacaattgattggacatgagggataaataaaacaattcaaaatgattatcaagtttctggcttgtacaatttaataaaatctgatgtcactcattcagactgaaatatgggggaggagaaaagggggaggtggtagagcagattggatgagatgggaagggaatggaggcaaggaggctctcttggacacatcagtgagtttggacatcttgtgcagacatatctaaaatataagcctagggtctaggatatccagatgaaagactgataaagggaatgcctgagaaggcatggatgtgaagaagaccaccagcatatcacaatcatctgtggaatttctgaataacttaggtgcctgggccccaatccctagtaattctgattcagatgatcgagcatagcaagcggatggctgcattttaaaaggctttgcaggtgattctgatgcatagccatggctaaatacctctggaatatggggtaacagcagaaagtgctgacgaaagaacactgccatttcagtggtaggcagaggatcaagaaaccccaaagaaaactgacaaactgcaggctgttagctaggagcccatggaggaatagactgttttatgcacagagagtggcctacactcttcaaatactgaagagaatctgagtaaaacaaagactaagaaaaaatttcctggatttagcactaaaaatgtcagtatatttggtgtaggaaagtgcaaaattgagagtagatgcaaaattatttggctgttagagggaggaaggcagtaggcagaggaggacccatgaaaatttgctttagcactgttatgctttgctttttgaaggaagtgttttaagtatgtttaaatacccatgttaaagacttagtccatggctaaagctggtgatccaagacaagtggcaggtgaaggagcaagtcaactgaaaaggcagaagcaggtgggactcaaggtacaggagcagatttctacctcaaacagaaataggatggaaatgtccatgtgaccaagagacagagtttttattgggaaaaaaggacacaaggctgactagagaaatgaatgggattttggcagtattgaggctccatccaattgggtctggagagtatgaacttgctgtggcaccagtgtaagtggttgtgtttttctctggaaacacaagggttaaaaatggggagatcacacaggtggattaatcctggcttgttatctcctgtttgggtttatgaggagaacaatgaagggttagcaagaaagcagttgagaaataagactattaggtctttaacgtaataagaggagctagaaagaaagaaaactatgcttagagtgtgggatatttgagtttaagattttgaggttggttggagcagttctggctgatgacaaagttcagagtgtggccatggaggtgaattgccaaggtaaaactgaagtcaagatcagtggatataaggaagggggatatgagaaaataaggttctcacccttgattgcacattagggtgatttggtggctataaaatctttcaacacttcagccccagtgaaatcaggatctttgtgggtagaaccaaagcatgaatacttttaaaagtacaaagattgagaaccacagaactcagctgtctgttttgtctaactgaattttgaagtcactcaaggtcatgaattgtagggatatttttggtttcaagacttttactcagcaaagtattgagatgaagagaatggcaaaatagccagcatggggaagaaacaaagaattccaacagctcttaaatattttgtggtttattataaaaagataaatggaacaaggattgtattgtcagacttctttcttatgataacctagagaaatctcctatactctcatttcctcttttttttttgtggccccctagagtaggagtataaataaatccccactttctttgtaaaagttcaattgtaaaagttcaattaggcaagttagagctataagcctataaaacactccagactcaactctgcaatttccatcttcacacttcaggtggctgtcttagatttagtttcttagactagggcctgcccttattagtttttcaattaccaccctcttccagagactgggtaactgatcaggtctattccagaggttgtatattagcaataccctttgcttcacacaaaaaaagctaaaaattaatggatatcctttatgtttcctggagtgagcaccttcatctgagatgcattgaataggaagccagctgagttcttcttgtcaccatggtgactttagcatccctgaattataggttctcacaggagttcacccaggtgaaggctttgaatatgatcagaaagcaaacctgctaggcccctaaatgatgcttcagcttacaaaagtatcaaaataatgattgggtattccctagcatagtggctaattcctagtagtttctcactgattaaatctgaaagatattttcctccctgttctccttcctgcagcaacaaagcccaggcttttcctgggaagtctaaggttgcaaaagatcttggttataaacaacagtagtcagaatgtccctaggaagccaggcttttaatttatcaagcattccctggcagtgaggcatccaaatcattttacttgactttttccttacctgataaatcagcaaagaacaagaatatgatgctaaattagtctgtgcaagaatgaaagccaaagtttccaaattttctgtgcccaacaactatgtgaaatctgagaaatgaactccaatcagtaacattaatgacttaaatttgtatgactttacagttcagtatatttatacgttatagtttatattttcatatcttttatgtcatctgatctttaaaagagttacaagtattgcctctttttaaaagaaaatgacttctggcttcagaagataaaacttgccagaagttaaacctgaaattaagtggctcactggaccccaagttcaaaatcagatattttgacttagaaaacagagttctttccgctacactattttctttatatatatatatgcacacacatatgcacacaaacacatacccacacactatatatacgaatgtatgcatacacacatatattttaagaggaaaatataattccagggggaaaagtattattgcaggtatcaataaccatttgggacaaatttaaaaggtcttaattctaatttgctgtgaaaagtcatgccagagttattacagcatcaaaaagtaaaacaaaacaaacaacttcagttccatctgatgtagctgactttttgatgagactaaaactgtgtagttcatcatctccatccaagttcagatctcaagtctatgatcttgactaccttaatgtatggctattattatcttgatgatcacattggctttgctttcggcacaccccgatctctctccctttcttctgattttctccactcaaaacaagaggggtatttttctccgacatttgtctcttccatgcccaatcttaaggaagacctactgtagttgccaaagcgcatcagcacctgggagactattttagaatgactgacatcattctcctgacactcaccatcagcccaattctcaaacaacataaggtctgagaacacagagtcgggtgctgtaaactcaaagaagtactttaaaccatggcaaattcatcacccctccaaagtgctgactaatatcttggggctagttcttttccaactcagctcatatcccattatcaccacatctcttcagtctttttgtcctgattctttatcgttgtgatcaccacccagtaagaaaacccttcctttggccttgctcttaccatatttcattgatattatgatgacactgattgtgagatgcattattaattgcttaatggtttttcaggacaaaaataaacactaaccttattaaatgagcacatcaattgcatgactcatccaaatttcagaaacgttaaaataataaataatgcttcaaaattgtcaaaaatacagaatatccttgctcacatcctcatttggcatagtttcttctgctccaacattttctgtaagaccctaccctctcactttcctgtacctctagtacagtgctgttcaatcgaattttctgtggtgatgctaatgttctaaaatctgtgctgttcaatattagacaactacatcttacacctaggccaaactttttcttcctaagctagcttgccctgttgccctcaataacaaccttaatcacagtgataatttcttcagactcacctccacttcactttagaaagacaaagtcgtggacttggtcacctccagccctgcatcccagtgcttggagctctgttgttctgttccatctccgaggcttgaaactgtctcaatttcccctctctaaataaatctattatcttcctatcacttaaacttcctagctcaccctgatcttggtatgtgccctcatgagaacaaccaggtccccagagttccaattcctgaccttttataaaccttgatacccaccgccttctgtaccttctagactgttgagcgttactagaaaaaaagattagtcatcttgactagatgttcaatgaatcgtgctatttacatttaaggagggttcaatgtttctctgcaatgctatttttaacaagtgattgaaaagctttatgttacttttaaattcacaacattacctcactttcctttactgtcaatagaaaataataatggcaatgatagtaaaaaatagctaacatttctgtgcatttataatgtggtatatgctactctaagcagtttatatgcatcatatcagttaactatcataaatattatttggccttactattttttatcactttacagaagagaaaatatatataaagcagccccgttgtgttgagaggatagaagccttcttacatgtaattgctttttctccctcatttgaaaccactactcattttctgttcttttcctgtatttcagaaaaataagattttcactttccagactaaatggatccatgcacgctcttaattctatccccattctatccttcaggacgtttctcctaattccatcccctgttccatcctttggggccttctctgtctctgacatcttcagtctatccctcctttccttcacatactcctgccccgatcacaatggttctttccactctatctacaaattctcacttaatgaacagaaagttaaaagatcttctcccgaatttgtcatttttttttcagtctcctccctttgctttacccctttaagcttcctgagagactgggaagggcagtgtgatgcagtgaggaacatgttcccaggcagccatcagggaggaggccacagagacgctgtggcacaaacgtggtagtactcggctttaatctgcaatggatgagaatgtctgagcagactgatgcacagaggaattatgtggcctctgccttgttatccaactattgagacatttggtctacatctaattaagaattatttctggcagtttttcaattacatggttatttcttcattttgcctggtagttctttatttctcaaatggtagaactcttagcattcctttaagcctttgcagtatgatttctgcctctatcaattctgattgctataattgagttcctaaaaagtcaacatgtgaccaagctttttggctgtgattattgtctttcttagcatttaaatacaagatgatcagccaccctaatcttctctccttttcaaatataatggaaacactgcttaaatttattgataggaattccacatcttggctaatacacaattctaagatgactcctattaccctcagccctggtgttactccacggttatattactttacatggaaaaaggaatttttgtagatgcaattaaggttactaatcagctgaccttaagataagattatcagggtgggtctaatctaatcacatgagtcctataaaacctataaaagcagagtgctttctttagctagaagcaaaaaaggaagtcagagagatgaagtgtgagaggggaggtcttccacggctgagatgaagatgaccaatgggataagaatccaagagtggcctctagaaggtcacagggggctacagccaacagctagcaaaagaagagggatttctatcctataattgcaagaaactgaattcttccaacagtggcagtaatgatcttgagagatgaccttgattccagataagatcacagctggttagcaccttaatttcagccttgagtttgagactctgagcacataaaccagccctgttatcctgaatttctgacctaaagagctgcgacattaaaaaaaaaaaaggatattgttttaagttgctaagtgtatggaaatttgttactcaacaataaaaaaagactatagccaaaacatctggataatttattgctgcatccttcatatcttagataagaagacggtgtctcataactctgaaacataaatttctcaatttttctttaaaataaaggtttgctcaagtgtaaattagaaaacatatgctttattaaaagaacattctctttcaaaaataaatacacgactatattattcatggattctttatggcattacaaaccaatgactgggcgcggtggctcatgcctgtaatcccagcactttgggaggctgaggcgggcggatcacaagatcaggagattgagaccatcctagctaacacggtgaaaccccgtctctactaaaaaaacaaaaatacaaaaaattggccaggcgtggtggcgggcgcctgtagtcccagctacttgggtggctgaggcaggagaatggcatgaacccaggaggcggagcttgcagtgagcccagattgtgccactgtactccagcctgggtgaaagagtgagactccgtctcaaaaaaacaaaacaaaacaaaataaaaaaaaccaatgcctggtttccattttagggtccgttaacattaaagtaatgtttgttggattctataaaataacagttggcctctgaagtatttaatgaaatgaggtttctatacatcaaacatttaaatgaaagtcaacaagagaattagatggtttaaacacaatggttatatggaaccatggtaatggtcatttcataaagtttatgtgtatatcaaaacatcaagttgttcactgaaaatatatacaatttcaatttgtcagttatatcccaataaagctgaaagtactattgaattcttaaaaaatatgttgaaccatgcatttctttattcaagggtgactgctttacagaacaaatgagtgacttaatttcttaatttggaaattctattatgtaattttagttaagctaactgcaagtttgcagtttacaaaaatggaaagcttttttataacagtgagatcccatctctacaaatttgttttttaaatgctaaactaaaatagaagacattaatattttaatagtgaaaggatgagcattagtttaactttcagtggtaaaaaaatcatattaacatccaaatcatgtaacaagttatttgcagtatgagaatagagtcaatattttgattaaataaattaaggtaataactttaatgaacgctgagctaaaatactaaaatgcattgatgaatagaggcatgtctagaccttgcaaatatatatgcttctattgcttcctatgcctcaaacataaataagatctttaatttctgtctttattatgtctgataaatatgctcctactttgcctttgttggctctataatcctccaattataatgcttctgttgtttgtcttattcttcaaaatagcccaaaagacctatcaggaagctttggattttgtacacatttaatttttcatacttcccctattcacttcctaatgaagggtctactctacaaccacattcaggcaataagaattagttaggtaccaacttagagtctagtccttccagtagcatttttagttcttcaggtaattgtgacttgactcacttaaggtcatcaattaccattcctcaaatttaactggatggtgataagtttgaaggtgtgaatggtattccaatagagaataccctgtgaccatgtattcttttcagaaaagtcacaaagcaggtgggatattttgtcactgttcaaagattaaaatgatagtaatagaggttatttaaaaatgttccaaattctagggttttatcttactattctttttccaaaactggagcatattctaagttcattgccacatgtatttcatattttattcttacctagcactgaattttatataagcaatatgctttctatcactttctaactgcattatgtattatcccttcaccccaccccaaagccttttgttaagccagtgatatcaatgaatgcctcctttaggggtgtggttcaggattcagtaacacattggagtatgtgctatacttcaaggcacattggagtatgttccttgaagcatcagatttttatgtgaagccaaaatagttttataaaatatagattgttattcatagcaatggtttttactgccaacaatgagagatgtttgctagcctttggttacttcctgagcataaaatcaccccagcactgcttatccctaaggcagaggctgaacaaggatggtgagaatctatatactttccagggttgagggaagaaatgagcccacacgtgacacctgctgactccttgtacctgcacccatattttatcctcaagtaagggatatctcagttcattgtccttaaagacatgtttctcaaagagtcattcttaaagttgtgtaaaacagaatctgtacattaattatctatgcctactgcttacttatctgaatagcaaagacaacaacaattaaaataaaaaattgctgccacagaattcactataaatgttaatgggactctcaagacaacccctttacagcttttcaaaacttcaaggggtatttttaacttaataatggaagaagaaaatgcttgcaatacacccaatacacctggtaccataaagaagaacaaatcaactgggagctgtgtggtgtcatgagagggcagcaatgcagggcagtgttgtggaatttggcaggcagcaccgggtctgaactgaattatcactattatatcctcatctatgcttctatgtctagaaatgtcccatagaacttcctgcagtagcagaaatgttctatatctgtgctgtccaatataatagccactaatggatatttaaatttagatttattaaaataaaattgaaaatttagtttctttcacatatggctagtgaataccaatttggatagagaatgagattcttttttagatacttataccacctattacttattgagccctaacctcaagccagaggttaaggatctattttgtaccaggcactgttctccaagcccagaatagaacaacctccaagacaagtagggccctggcaccatggacttcagactagtgtgggggatagaaaaagaataagaaaataaatgattctatgatttactttggcatattatatagggcaagggactgtgtgtgctaggaaagggtaagactgttcttagaaaaggtagttgtattagtccgttctcatcccactaataaagacatacctgacactgggtgatttataatggaaagaggtttaattgactcacagttcagcatggctggggaagcctcaggaaacttacaaccatggtggaaggggaagctaacatgtccttcttcacatagcagcagcaaggagaagtgccaaacaaaaaagggaaagccccttaaaaaaccatcagatctcatgagaactcactcactatcatgagaacagcatgagtgtaactgccaccatgattcaattacctcccacttggtccctcccactacacgtgcggattatgggaactacaattcaggatattttggtggggacacagccaaactacatcagtggtcaagcatggtctgtctgagaaagtgacttctgagtgttgttatgggttgtactgtgtccccctatcaaaattaatgttgaagcctaacctctcagtaccctagaatgggaccctattggaaatagggtttttgcagatgttattagttaagatgaggtcatataggagtaagatgcaccctacttcaatgtgactggtgtccttgtaataaaagggaaatttggacacagagacatgtacagagagaagacaaagagaaatttggacacagagacatgaagggaaatgtggacacagagacatgtacagagagaagacgaagagaaaatacagagagaaggccatctacaagctaagaaaaggacctgaaacagatccttcctcacagccctcggaaagaaccaaccctgccaacaccttgatctcagactcctagcctccagaacggtgagataataaatttctgttgcttaaggcaccaagcttgtggtattttctatagcagccctagccgactaatacaagtggcaacttgatgaggaagccatgcaaattgcgcatgtcatttaatcctcacagctaccctatgtgttaggcattggtgtgtccatttatcagatgagaatttcaagttcaaaactatgaaaataatttgcctgaggaaatattgctcttatgtggcagactcaagacagaagtctgagttagcatgatccctgggtctcagtgtttcttattatactcttttactaccttgacttatctaaatacactcacatctgattcaatgacaatgaaacaattaattttacaagtaaatagattagtttatatggttatgtctataccgtagtttcagttaaaataaaattttaaagtctagcaaaggtgtcttatttggcttttccttcaaaactaactccgtatttgattgttgaatctatctgtgaatattagcctttgaagtatggagatacatacacttttatgcatatgcacacatacgcacatacgtctatatataattttagtctattttatagcttacattttagattaatttaagcattgtgatgtaaagtctacagtactcttttctcagccttttccccactaccttcccttgtattttacgtgtccagcctgacactcatattatcttgcttcaggatacatctatttcttaaagtcatttttctatgaggacaatcacaatccccttataatgaatacaagcatgtttatagaccctcaccttcatcaaagaggcttcaatgttctcttaagagtgtatgaagctggaaatatattctgaaaatataagctcaacacctgccttcctgaaaatatgggtggtggaaagcccttgtgagtggatagcccatgatttgtttgctcaattagtgaaaagaaacacttcaattggcaaaaatgtttgcccaaatgagaatggctttatagaaatgttctaaatatggcctgactctaatcaagcaatgccatctgcttgatgagtgacaaggtcacaacttctataatagaagcagtctccagtgccagaaatgaatatacagaagtccaactgctgcctacactaaacatggctacctatgttgtaggaggcctgcacgtgtctgttagcttcaggtatgatcttaccaagaggcactttcattggtcttgatcctgctaattatgaggtgtagacccttggctgagtcacttaatattcctgacgctcggttttttttccctagaaaatgtagctaacaatttctatgtctcatatttgtggaagggataaaatgaggtcatactcttgaagacatcttgtgaaatgcaaagtaaaatgtaagcaaaaggcacaatttttccacctgtaaggaatggctcctagaataaaaaattactttgaagtactttttgagtacttattttgtaccaagcacatggccaataactttatttgcattatgtcattttatctcataatgacactatcaattatgtattattacaactgccatcttccagaagaggcaactagtagtgcttaaatggtttaggtgagttgcccaaagttccccagctagtaagtgccagagagtagatttgaacccacctgtgttcttaactatttcttctcttatcccttatgcccctgccaacagttaaaaaagagcaactattcttaaaactatattactgagataatttacttgcttttgtttgtggagacaaaaattttaagatcattatttttcaattgtaagagaataaagatggccaaatagaaacagctccggcctgcagctcccagtgagatcaacacagaaggcaggtgatttcagcatttccaactgaggtacccagctcatctcactggacctggttagacagtgggtgcagcccacagagggcaagcagaagcagggtggggcgtctccccacctgggaagcacaaggggctcgggaactccctcctctacccaagggaagtcatgagggactgtgccgtgaggaacgaagctacccagcccagatactatgcttttcccacggtcttcactagccacagatcaggagattctcttgggtgcctataccacaagggctctgggtttcaagcacaaaactgggtggctgtttgggcaggcattgagctagctgcagtttttttttcataacccaatggcacctggaacaccagtgagacagccattcaatcccctggaagggggctgaagccagggagccaaggggtcttgctcagtgaatcccacactgacagagcccagcaagctaagatacactggcttgaaattcttgctgccagtatagcagcctgaagtcgacctgggatgctctagcttggtgtggggaggggtgtccgccattactgaggcttaagtaggtggtttttccctcacagtgtaaacaaagctgccaggaagttcaaactgggcagagcccaccgcagctccacaaagttgctgtagccagactgcctctctagattcttcctgtctgagcagggtatctctgaaagaaaggtagcagccccagtcaggggcttacagataaaactcccatctccctgggacagagcacctggggggaggggtggctttgggcacagcttcagcagacttaaatgttcctgcctgccagctctgaagagaacagcagatttcccagcacagcccttaagctctgctaaggaacagactccctcctcaagttggcccctgacccctgtgcctcccgatagggagatactcccagcaggggttgacagacacttcatacaggagagttctggctggcatctgttgggtgcccctcttggacgaagcttccagaggaaggagcagggagcaatttttgctgttctgcaggctctgctagtgatacccaggcaaacagggtgtggagtggacctccagcaaacctgcagaagaggggtctgactgctagaaggaaaactaacaaacaaaaagcaatagcatcaacatcaacaaaaaagatgaccacacaaaaactccatctaaaggtcaccaacagcaaagaacaaaggtagataaatccatgaagatgaggaaaaaccagtgcaaaaaggatggaaattccaaaaaacagaatgcctcttcttctccgaaggatcacaactcctcgccagcaagggaacaaaactggacagaaaatgagttagatcaattcacagaaataggcttcagaaggtgggtaataacaaactcctccaagctaaaaaagtatgttctaacctaatgcaaggaagctaagaacattgataaaaggttagtggaatagctaactagaataaccagtttagagaagaacataaataacctgatggagttgaaaaaacacagcacgagaacatcgtgaagcttaccacagtatcaatagccaaactgatcaagtggaagaaaggatatcagagattgaagatcaacttaatgaaataaagcatgaagacaagattagataaaaaaagaatgaaaaggaatgaaaaaagcttccaagaaatatgggactatgtaaaaagccaaacctacatgtgattagtgtacctgaaagagatgggaagaatgaaaccaagttggaaaacacttttcaggatattttccaggagaacttccccaacctagcaagacaggccaacattcaaattcagaaaatacagagaacctcacaaagatactccttgagaagagcaaccccaagacacataatcgtgagattcatcaaggttgaaatgaaggaaaacatgtgaagggcagccagagagaaaggttgggttacccacaaagggaagcccatcagactaacagctgatctctctgcagaaaccctacaagccagaagagagtgggggccaatattcaacattcttaaagagaagaatttgcaacccagaatttcatatccagccaaactaagcttcataattgaagaagaaacaaaatcctttacaaacaagcaaatcctgagggatttcgtccccaccaggcctgccttacaagagctcctggaggaagcactaaatatggaaaggaaaaactgataccagccactgcaaaaacatattaaattgtaaagaccgctgacactatgaagaaactacatcaactaatgggcaaaataaacagctagcatcataatgacaggatcaaattcatacataacaatattaaccttaaatgtaaatgagctaaatgccccaattaaatggcacaggctggcaaactagacagagtcaagacccatcaatgtgctgtatttagtagactcatctcatgtgcaaacacacacacaggctcaaaaataaagggatggaggaagatttaccaaacaaacagaaagaaaaaaaaaaggtgttgtaatcctagtctctgataaaacagactttaaaccaaaaaagacagaaaaagacaaagaagggcattacatattggtaaagggttcaatgcaacaagaagagctaactacctgaaatatatatgcacccaatacaagagcacccagattcataatgcaagttcctagagacctacaaagagacttagacttccacacaatactagtgggagactttaacaccccactgtcaatatcagacagatgaacgagacagaaaattaacaagaatattcaagacttgaactaagctctggaccaagtggacctaatagacatctacagaactctccaccacaaatcaacagaatatacattcttctcagcaccacattgcacttattctaaaattgaccacataattggaaataaaacactcctcagcaaatgcaaaaaaccagaaatcataacaaacagtctctcagaccacagtgcaatcaagttagaactcaggattaagaactaactcaaaacagcacaactacatggaaaatcaaaaaacctgctcctgaatgactactgggtgaataacgaaacaaaggcagaaataaataagttctttgaaactaataagaacaaacatacaatgtaccagaatctctgggacacagctaaagcagtgtttagagggaaatttatagcactaaatgcacacaagagaaagcaggaaagatctaaaattgacaccctaacatcacaattaaaagaactagagaagcaagggcaaacacattcaaaagccagcagaaggcaagaaataactaagatcagagcagaattgaaggagacagagacagaaaaaaccctttgaaaaaatcaatgaatccaggagctggttttttgaaacgattaacaaaacagaccactagccagatcaatgaagaagaaaagagagaagaatcaaatagacacaataaataaaaaatgataaaggggatatcatcattgatcccacagaaatacaaactaccaccagagaatactataaacacctctacacaaataaactagaaaatctagaagaaatggataaattcctggacacatacaccttcctaagactaaaccagaaagaagtggaatccctgaatagaccaataacaaattctgaaattgaggcagtaattaataacttaccaaccaaaaaaagcccaggaccagatgaattcacagccaaattctaccagaggtacaaagaggagctggtaccgttccttctgaaactattccaatcaatagaaaaagagggactcctccctaactcgttttatgaggccagcatcatcctgataccaaaagctggcagagacacaacaaaaaaagaaaatctcaggccaaatatccttgatgaacatcgatgtgaaaatcctcaataaaatactggtaaaccaaatccagcaacgcattaaaaagcttatccaccacgatcaagtcggcttcatccctgggatgcaaggctagttcaacatatgcaaatcaataaacataacccatcacataaatgaaaccaatgacaaaaaccacatgatcaactcaatagatgcagaaaaggccttcgataaaattcaacactccttcatgctaaaaacactcaataggtattgatgtaacatgtcttgaaataataagagctatttatgacaaacccacagccaacaacatactgaatgggcaaaagctggaagtattccctttgaaaactggcacaagacaaggatgccctctttcaccactcctgttcaacacagtattggaagttctggccagggcaatcaggcaagagaaagaaataaaatatattcaaataggaagagaggatgttaaattatctctctttgcggatgacatgactgtatatttagaaaaccccatcgtctcagcccaaaaactccttaagctgataagcaacttcagcaaagtctcaggataaaaactcaatgtacaaaaatcacaatcattcctatacacaaataatagacaaacagccaaatcatgagcaaactcccattcacaattgcaacaaaaagaagaaaatacctacgaatacaacttacaagggatgtgaaggacctcttcaagttgaactacaaaccactgcccaaggaaataagagaagacacaaacaaatggaaaaacattccatgctcatggataggaagaatcaatatagtgaaaatggccacactgtccaaagtaatttatagattcaatgctattcccatcaagctaccattgactttcttcacagaattagaaaaaactactttaaatttcatatggaaccaaaagagagcccgtattgccaagacaatcctaagcaaaagaaaaaacaaacaaacaaacaaaaaacaaagctggaagcatcaagctacctgacttcaaactatactataaggctacagtaaccacaacagcatgctactggtaccaaaacaggtatatagaccaatggaacagaacagaggcctcagaaacaacaccacacatctacaaccatctgatctttgacaaacctgacaaaaacaagcaatggggaatggattccctatttaataaatgctgttgggaaaactggctagccatatgcagaaaactgaaactggaccccttccttacaccttatacaaaaattaactcaagatggattaaagacttaaacttaagacctaaaaccataaaaaccctagaagaaaacctaggcaataccattcaggacataagcatgggcaaagagttcatgactaaaacaccaaaagcaatggcaacgaaagccaaaattgacaaatgggatctaactaaactaaagagcttctgcacagcaaaagaaactatcatcagagtgaacaggctagagaatgagagaaaagttttgcagtctccatctgacaaaggtctaatatccagaatctacaaggaacttaaacaaatttacaagaaacaaacaaccccatcaaaaagcagacgaaggatatggacagacaattctcaaaagaagacatttatgcatatgaacaagcatatgaaaaaagctcatcatcactggtcattagagaaatgcaaatcaaaactacaatgagataccatctcacaccagttagaatgacgatcattaaaaagtcaggaaaaaatagatgctggaaaggatgtggagaaataggaatgcttttacactgttggtgggagtgtaaattggttcaaccatcgtggaagacagtgtggcgatttctcaaggatctagaagtagaaataccatttgacccagcaatcccattactgggtatataatcccaaaggattataaatcattctactatagagacacatgcacgtgtatgtttattgcaggactattcacaatagcaaagacttggaaccaacaaaaatacccatcaatgatagactggatgaagaaaatgtggcacatatacaccatggaatactttgcagacataaaaaaaaaaaaatgagttcatgtcctttgcagggacttggatgaagcttgaaaccatcattcttagcaaactaacacaggaaccgaaaaccaaacaccgcatgttctcactcataagtgggagttgaacaatgagaacatatgggcaaagggaggggaacatcacacactggggcctgtcggggggttgggggcaagggaagggataacattcggagaaatacctaatgtagatgatgagttgatgggtgcagcaactgaatctggttttcaatacttctgttgaaagccataaatatgatttaatatggactataataaggtactattctgctcttcacttcaaagacacatcttttgaatatggcaagtagctagggaaatatcaaaagttccagtattatttcgttatattttccaaattctccactaatctttgagtgtagacatttaaccaaataaaatgattcatattacttaatgttgttactcatgccaaatatatttcataataaaacaaagacatctgagtgtagagagaggatggataggaaatgacaaagaaagtaaagtgatttgagaagggattaggtctaatcagttgggtttatttttttctgggaataattaagatatttactgaggcaatgggttatcataaagcaaaaaacaaagaaactcctaactcactccatgagatcgaatttcataaaagcatttctataaaaatgatgaatagaccaccagaatcgaaatgtatgcaaattgcaaagctagttggaggagtgtgtgtgtgctgccttggtctctcaagtctatcaaaaaaggggaaaaagaaaaggtgacttgctgcctgagcagttctatgcctaacatcagatactgtaataccaccattaaaaaaagggaattcatcataaatgctacttaaaagacagtaaagagccaacacacatgtttgagaacaagtaactcctatcagggaccttaaatgagagagatacggagcttaacctgagggcagcagggcttcctcagtgcccccaccctctacctcccaatccttatagtatcacttttctttagcctacaaagatacgtgtgaacacagttttttgttgttttttttttaaagaaatgtaaggacaaagcacatttgtaaatagagggaataggacatagtggattaaggacagtgtatagtgttttatataaaagattctacaacaaattttcttgaaaaaatgaggcaggtatgagatgtcctgaagcccccagttctcataacttttaggatatgagtaaatttgttatatggcatttcacaggtactgaattgcaggattttggtcagtcacagtttcttgccagaagcactatcttttgtaaagggctacatagcagaatttttgttctattttagttttattttgcttttgtttggtgggaagtaggaagagaaaaattcttactaaattccattacctagaaatatttttatagcataaaacattttccacaaatttttctatgcacattatttaataattttttataatatcatttccaaattattatacatctataataccaatgtaatgactattgtgtatagtctcgatattactgatccatttttgagatattaaggtttttttcctttttttactataataaacaatattgtgatgaacagcttcttcacatatattttggctaatttatctgactatgccctaaagttaaattcctacaaagaagagaaaatcttctgttttggaaagataattggtgctttagaaagatagttcttgctggtggcgatggctgggttgggggagagaaaagactaaaagactaagaagcccataaccaaaactcaggcagtggtaacagaagtgcagatgagggagagcagaaaggatactcagaaggtagaatcaacatggtacagagactgatccatgggaagctaaggagagactcaaggagagagaaaagtcacgggtggcctgaaggctcctagcgtgaacaactggggagtacataatgaatttcaaattgaacttgttgagtctgaggtgccttcaaggcatcctagtagaaatggtcaatgggcagtgcacagtggaaatatatagcattccaggacacagacccacacattcctgacaaacacaaatcaatttggttttacaggagttcataatatcacccctgccaattttaaatatagtgtctatagtgtgtgtgtgtgtgtgtgtgtgtgtgtgtgtgtgtgtgtgtgtgatgggatggggattacacaggaagtttctttggttgttgtccagtcactgcatttgatgtacatttgatgtaacagttctttttttttttttaacattaatgccccaaccttaaagaagagcttttgtcttattataaacaatactgaattaaaatttgcaaatttaaaactagagcaaatatggaaaaagttattgaaaagtaacaatcaatccatcaatgctcccagtgaagaataaacatcatcataagaatgcccaatatttgcagtgtctattgttttttgaaaaagatttacacaggcataagatatttgatttttaccataaccttggaaggcacattagtttttattgctaatttacagatctaaggaaactgaggttctgaaaaggtaaacagtgtttttctgttgttcaaagctgggaaatgcccaaattgaaacttgagccctggctttcagactctggagccggagttcttcctctcacccttcagctagctgcattaagtcaatcaatcaataaataactttttattgcctgttctttctcttcctcctccttattctaatcaagatattttaagttttgaattaaaaatttatctcattcttatggcaaagtaggtttcaagccatttcacggaaatttatacaagtgcctttgtgctacaatggctgaaccagagcacccagctctcaggcagtccccactgtggagacagagcctgctgtcccactggacagagcctcaaccctggctgactcacagccctgtgtatgtcacttggcagcttcttccagtagcatgtccttccactacattcttcagtcacctttctctactgcacaaatcctgcctgataatatgtgtgcaatgcaagcccacactactttttggaacctcattcaattgtcacctcttgcacagaaaacaaacaacaacaacaacaaacaaaaagctatttttgagtgtgcctgtttatcaagagtgttctctaaaaatttatcataatgccattatcattctgtaactccatggttcagatttaaggcaattctatatctctttgtctcttgtgtagtctccagtcaacttcattctcagagatttatagaaaatttttcccatatactgctactcagaagtcacatttatttttcaggttttttaggctgagtctgacctggaagcactttttttatgggttcagtttccctactcttgaaggttaaagtgactttctccggcttcctagtttattttagaaagccattataactgtgacagaagaaatctaaccaaaatagcacaaaaatattctgaccaaactcagtttttacttttggctgaaagctatttaatgtatgtttggtgccacttaaaaaaaaagtttcattgagatgtaactgagataaaataaactgcacatattttaaagtgtacaacttgacaattactgcaaatgtatacaccagtgagaccatcaccacaagcaagggaatgaacatatccatcactcccacactgccgacttcccgtgtgttccttcagaatcccttcttttccctcctttgccacatattctggaaagggagagcgaatatcgttaaaacttcaaattctttccagcttttctatagatctaactttgttttaataaaaatcacaataggagtcttaaaaaatgtaaaaacattgtccagaaataaaagcactttaaaatgatgttacaaatgaggaaataagaaaacaatgaacacatcaatacaaaaccaggcaaagtccataggcagagaatgctcatccctctgaaatggctaataaaaagactgaaatctaaatctaaatcttactaataatcaaataaataaatgacaattaaaatagcatattcatttacattaatttttgtcaaagatttagaagacaatatgatgctcagaatttaaagctttttgaaagtagacactaatatattactgaaaaaagtacagatttccttgtaactattgcaatattaaatgtacattatttttgatgtagcaacttatctaggaattaatactaaagaaataaataaatgaacaatggcaacaacttgggagcaatataaatgtctgtcattagtaaactggttaactatctaatggttcattcttataaaggaatcaccagaggccatttaaatggtaaagtttatctgtatgaattaagtggaaagaaaaagagtggaagtaaaggagatacatatagaatgatttcttttcttttgtacacaaaaataatccactgtgtttttcaggtgtaggaagaactctggaaaaaactatataaaatttaagtaaagttttctctgggaatggaagtaaaacagctttcactttttactatatatatatttaattttactaaaaaatatttactacttttataatttcaaatgttttcatttaataacaatatgtatatattcttattaaacttatatagttttctatgtccctctaaacatatacactgatacggtttgactctgtgtccccacccaaatctcatcttgaattatactcccataatttccatgtgttgtgggggacacccggtgggagataatttgaatcatgggggaagtttcccctatactattctcgtggtggtgaataagtctcacaagatctgatggttttatcaggggtttccacttttgcatcttcctcattttttcttgccgccaccatgtaagaagtgtctttcacctcccaccatgattctgaggcctccccggccatgtggaactgtaaatccaattaaacctctttttcttcccagtctcaggtatgtctttatcagcagcatgaaaacagactaacacatgcactaagaacaaaatcctaaaaaatacactacaaggtgttagagtcattctataaccacgagaagtcttataaaaaatttgttcatctgatttttctaatttttgtacaattatttgttataagctgtataacaaaatacttctaataaactcttgtttaggtaaaatcaatataacaaaaaattacttaaatagtataaaatagtcaatctctacatttttttttccaaatgctgacaataacaataaagtaaataaagtcactatagggacttctgcttcttgcccaaaggagtcaggtttatgcttgctcatgaaagaatggaaaaactggacaaaatgaatgaaacaacagttttcagaccttaggcaacagttagcttagcatggtgattagagaaaatgaatacaatgagatgacgcctatggttgccccagtgtacatgctggagagcttccaggtcccagcataaggaggagggatcactgcctgacctgaaagtctccctaagttgaggagatggagctgggaattcagggaggtcaaggtaactagaatttgctgaaaagagaggagacagtggcccagagagggaactcagggacatctgcacaggccccctcttgagtcttcagctgagtgttgatcagcctgaggaaggtgaaatttctgggaaaaagctggaggaaggaatgacaaagacacgaggaaacttttgggggtgatatatatttgtgtactatctcagttttggtaattttctcacagatgtgtatacctatatcaaaatttactaaattgtgtaatttacatgtagtttattatatatttttttccagtggagttttaaaaacaattttgtaaagaaaaaaatgtatggtgaaaatgaactgatgggataggatattactcaaattagctctttgtgtaagcacggtacaattagcatcgatttacatttacatctcttcaggttgacaagaaagcaagtatggataccaccaaaaacacctatataatttgcatccaaatgtagtaaattactttgaaaaatattggaagttttccctagtggattaaagttttcctaacatgtgactttaatcattggcctattactctaagaaattgtaattcactaataatacataaggccatagacctgggtctgccccctccctcaatatcaataataccaacatttgtagaaggtatataaatgttatgcacttcaagaagagaagtatgccaagagagatgtaataatgcatgagatagagtctagagaatttagaacaagccttggtttagatgaacattaagggattaagggctattcttccagtaggacatttgtaggagaacaggaaagccaggtgaccatattctacagggcaggcctgagctttatctatttcgtggctggatgttgcatgttctctgaatcagcaaattgtcagtgggaaaaatgtatctatattgactgctctcaaccagcttatttaagataaaatagtaccttggcagccagctgaagagattttttggtactgtgttggtctgagtaatggattattgatctacagttaaactgatctgaaggtcagacttctaggatttctctcagtctcacattctgaatccattgttgtcttttaggaatggttatatcagaggtacctgactcatctttggccagaacaacaggagcaaatctggtattacagtatgtgggctgcaaatataacaaaattagtgcctctatattttgctctgcagattgttcctgaattatggtcccacagtcatgctgcattgctcactggaagtttctataatgagaatttaacccacttgtttacactggaacttagttcataggttctcatcacatttatttcaggctttcaggtgaaataccctgcctatttgagcttacaacatttttatttctaatgtaaacgtgtgtatctgtacgtgtattttaatcaataaaatgacagattctcagcttctcgaggactatgccgaaaaacctaaaggataatccaggttacaaatagcacattctgttcagtgaattgggctttcatcccattatcagacaatgccattggttctttaaaattaatcgaggggaatatttcacatgaaagggattacttcttcctatgcaagtcaaaaaattggaaaacaaatgaacatttaaagcctactggagcccagctgtttgccccctgaaaagattatgctattcaatgactggagtgatttaaagaagtagcatgacatttgaattattggctatcaaaaagaacttgtggaggagacttcataaaatgaacttctaagaaataccccttgagaaatggtgctgaactctaggaaaaaaatagaactatttctgtttaactgtaaggacagcttctgtgtttccttaggcaaacagatttcctgtggtctagaaatgtttctgtctaccacagaggtggatttaccgtgaggctaggaagggtgaagcttcagggcccctcacttgcacaagctccttcctaaggcactggaaaaggctcgaggggtgggatggcatgctcctttgcttttagaattttgcatgagtgagacattttaactgcagaagtttaagatcaatgtctacgtactgattttgcctatatcacacttttcccttgggttagttagcactggggtgactgtgggccattttgggatctggctaattagaaactgagttaaagattcatttagtttcagtttggtgtgattatattcttgtggttctcagtctcttccctgtacccttaggttcttgctggctgtctgggtgtagcttccacgaacacacctgattaccatggtgctggtaacatgaaagtgcaagcccagagatcactccaaaatcaatgtgcccagagcttcaggcaccacaagtctgtgtggagtgaaggagacacaatgttcaaaacatataaagccaggaactgctctttgaaaattcttccaaatcttacagttcacaaatgaaagacatttgatagagatatttcccaagtttggtcacagtcctaagaatgtatatgaaatcacccccaaaaattgagaaacttgatgtaacttttctaaactatcggtaataaaatgacagattacaatcaattatactagagaaaagactgcattatcttgttattctcaacatagaaaacataatagaatcatgtaaaatgaagaggcaatcagagaataagcaaccaaaactacagagccaaaaaaatcatagaaatgtatcaagcaattaattttctgaaaatgaagttaattttataaattttgttatccttgtagaatttgtcagctttattaattttataatctggtgtgatttagttttacatcctaaataaatattcaatctccacattcaatacatattccaatgatgtatccatttctcttaaaagggactcctcgagttgtataagacatcagttggtataaagcctggacccactccttgtcaactaccatagtttccctgggatatgaagaggtaacttcctttatattacaactaagtaataaaatggatataaatgtattagccgaactgcaaattgtgatattcagcattttaagggactgattctgttggatactcagaaatataaataggccaaatcctatgaccaataaattaatcaattgataaaacaatgtatctttttcttgattacactaaaaatttaaaatattatattccttatacaacatttttaatttaatttgccttgtaagtgttggtagtatatgcatagttctccagaaatatgtttttaaatatctttatatataaaactgggttttaggtcctcgatttgtggcaaacgttttgaacgcttgtttggcttaaaattcacaaacatataaactagcaatgacatcatgataggctttgtgcatttcttaccaaaagtgataaaatttgtagacaataggccgggtgcggtagctcacacctgtaattccagcactttgggaggccaaggcaggcggatcatgaggtcaggagatcgagaccatcctggctaacatggtgaaaccctgtctctactaaaactacaaaaaattagctgatcatggtggcacgagcctgtagtcccagctactcgagaggctgaggcaggagaatcgcttgaacccgggaggtggaggttgcagtgagccgagatcacgccactgcactccagcctgggtgacagagagagactctatctcaaacaaaaacaaaaaaaaatttgtagacaacatatttaacaagtctgtcatacttgttcagctccataatccttactacaaaatgcacataatctggcatattcacagccttcaagttgaaatggaagctttcatcaagttcatcaaattacacaaatcacacatgacaaaggagagaccacaaagctggtgtacaattgtttaataatttatatgttaatattggtaaactaaagccaaatataaaaatgaaacatatcatcaatgacatcttcagataataaggataagattattattttaaaactgtaaatttagataaactgaggtctgtataattcatggtaatatttcctatctttctctatatattattcatatatgtacattttaaatatatttttgaaattagggatttttcaaagtttttttttttttaattaaaatagtgattttaaatatacctatacctgtttaaatatatctgtaaaatgttcaggttatgacacactttaaataactaaaattcatcttaaaccgtatcttctaccacatcatttacatgtgcaggagataactgcagataagactgaagaaggatggaagctgaaggtttacagagaacaaagtttttgatacttccaactgtgaaaacactttaagtattcagaagaaaaggttgtatcataaaattatatatatgtgttcacatttaaaacctcaatattctataaagatctgaattaaaattaacttagaaagtaattttgtcttatgagatgactgaatggaactattaaacacataacttattcatatgattttatttttatatatctttgcaggaaaaggtatatgtaaaatgaggtagaactaaatcagtgattcttaacccagaatcactacactgtaatagaaatatgaatgtgattccagtggtacatgtaactctaaaattaaatacaaattctctgtgtgattatgtatatatccagagtttccataagagctctgctacatctacttagactcttggatgattccagaactgctaatagagtgaaacacacaaaccttttagaaaataaatttcactaagaagaaaaagaaatgaagttctaattgtgttggtaatgtcccagtcccacccacacatcacgagagagagaaaaagaaattccaagaaggatttgataatttcaaggaacaaagtgctcaggagatatattcactgaccaattccccaagtgctcatgtgtgagcaattcaaaaattctaaaaatactattcagtgacatctcaatagttcttcaaaatatgagattgaaaaacaaggcctttttccaagtcactctcttaaatatggttaacattttcattacacaataattttgaagagtttttgagcctatggataccttagttaccaaaatactatgaatgtgagcttctgtagtcattaaagaataaagatgactaattattaatttaaaggttatgaaaacactcttaaatattaatgactaaacacactaactgataggttgtgtttggactaacactgacagcaagcttcttgtgaagtctgctggtcaagttaccaaatcagaggtgcagaaagacaagaaaattctcaaaaatgcttccacaagaagaatccttgaagtaatttaggcatctaacctcaaaaaaaaaaaaaaataaggtttaatggaggaaattattgctgtattctcttgcattatcaaggctaagaaagattattagaattattttgtatctttctggcaacatgcctcataccaaagggaggaagtggcagggaaacaattcattacaaagaatatttttctaaaaatgagtcctaggcaacaaggaaagagcttgtcttacgagttgatgttctctcccgaaaaggcaattttaagcattgagaatgttctgagatggatttctgcagagtaggaagttggattcttatatataggaaatccctgtcagtacttaaattctacgattctatgatttattaagaatagccacttgtgaccacatagggcacaacctgaaaacagggcagccgcctaagagaaggcccttaaatagttatgagtgaatgcccaatgtgaggtgaagaaagggagaggtcattagaaaggaagttgtgtacaaaacacaagattttactgccttggtgaattttgaaccacagccaaattactttcttctctgagaagatatgaggaagagaataaaactcttcaaggcaacagcatgatataaatccaaagcattttcatactttgggaacgtgcttgcatgcagaagtgtgagccgggggaggaatcttgggtgataagaaaaacacgtcagcagggcagagtggtgaatggccttcaagataaggataagtaattgaaattggttaggaaagcaacagggagccagaagaaggaattgaaatgagtaatgggaagccagaagattagaaaagctagacggattaccttgggaagcaggattttgagatggtaatggccaaaggggagattgtagaatcaagacaggaaacaaaaagacaaggatggatagacctattcccgaaacaggaatagtaccttcatgaggtcccagagaggcagtttgtaataacaaaaatgaggccttcactgaagcttgggagttatataacactgatctaggatggcatgcttacctgtcaccgttgcttggtatccatcaggaaatgtttgttgcatgaatgaagaaaaagacacagttccattctacataaaataatcattcaaaatcaccaatttgggaaacaacaatcaactattagattgttaaaatgttgatagtttgtgaacctttttttttttttttttttttttttttagcaatgacccaatgtcactgtagtgtttcttcagaactgcttagacttttgtgtagaagtaaaagaaaagaccatcagttcttaaggtctgagcctgaaaacaaacgttctttattttgaatttgttttcaatgtacaaaaggtttacatgaaaaatacaggcaggctaatattgcaaacaacatgtaatttcaaagaggaaaaatattcagtactttccctctcactttttaaattagattcagtaacatgattaactcttacctacatgttttcagaactaagatgaataaattagaggggtggttcaatttaaaacaccttttccttttagtaaatctaatgtttatggtagtcaataaaagaattgctcttttagtcatagaaaagcctcagaagctcttctaattcttctattctgttgattgatgcaaattatctctacagggaattaattttaatagttaatgaaatgaggaggctgaagatgcagaaatcagtgccttgagttatctttgtgtgtctgcaagggctaactctgcactctgctgtatagccagcaatgacaagtatcctgaattgactgaggaacaatctgaaaaaaattcacaggaatcttaaaagactcagcagcctttagccaatatccattcttaagtgtgatttaagtgacacttccaagtcttattaaaaaaaataagtaaacataactttaaatacctaagatttctggttagtaacatctaccatgtttaatgttatggtcgattttattgtagcagcttgataaaagatcactacttaataagtaaggtcattctattaccaatttgaaatgttgatttcatatatctatgcactcacttctccataatttgatgtttttgtggttgcctcagaagctgtgcaatagctaaataaagaagaaaaaatgtgactaaccaggcaacagcccagcccaaatgaatgtgttgtagtttttataaagtgctatttgtataaattcattaataaacttttattttataaaaataattgttggccgggcgcggtggctcacgcctgtaatctcagcactttgggaggccgaggtgggcggatcacgaggtcaggagatcgagaccatcctggccaacatagtgaaaccccatctctactaaaaatacaaaaaaattagcctggcgtggtggcaggagcctgtagtcccagctactcgggaggctgaggcaggagaatggcgtgaacccaggaggcggagcttgcagtgagccgagatcgcgccactgcactccagcctgggcaacagagtgagactctgtctcaacaataataataataataataataataataataataataataataataattgctaaatgagagcaaagcttttcaaatcaatagactgtttcattctttctcaacctctaatacagaaaacaaagatcttttatgtcatatttagtgcatgctcaataaatgttctttattttttcttttctttaacaccgagtgaaaaaataattttatctgaccttccttccaaaattttatttggctgacagaatgctaggcttacatagacagggaaggtcacatggagtacttgggtcattcaatatatgaaacttttccgtggaaaatattaataattataattgttgagtgtaataataatccatatcttgacattaaaagaattgctgagttttatgaaaatgattatttcccttccttccttataataactaatggcctaattctaattcttaaaagtatttttggagaagcactagattaggagacagaaagaaagaaaaaaagatagaataaaagaaggaaggattctatccacctggcatttctcagtgtctgctggttccaaaatatagcaccatttgtagtggatgatgtgaagattccccttcaagaatgaaagactcattttcctagattctacaagtgctctcagctgtcagccctctgtaaattgccttagctaaagagcaccattttgttccagcatctactatcaagtgaccaaggatataaaggcctaaccctctcacccgaatttaggacaactctcaagggcatgccagcttcggaactgtctattggctctgctgaggccttcctcaagactgcattgcagaccaacttcttctatctggtcccataattctgccttcttccctcccctccataggtgttggtcccaagaacggtctcatatatgcctcttgctaccccatctcttcttcctcagaggcaatcttcttctcttggaaacctaatctgtgaagcactcactgagaacactgaaagtacaccattagtctctgcctgtggccattcattccttaaaagagtttactattaaaattaagctactgaaaaaatgaaccttagacaaattttcacttctccataattccccttatgtacatctatctcctttgatagaatgccacataagcattcacacatatcagcctagattctttgcttgcccaatatgtttgcgttgtgtgctcaggatgtgtaacaataagcatttggagtacactaagagaatttgtccctgcaaaatatacgaaactttcacagctaatattgatatcaatttaaaatagatatcaatgttaacataattaagaggtgtgcatttcactgtggcttttaaactttccttatgactgtatatttgtttgagagatctcaagactttattgtttactcattctttttcccagaagggcaattataaaaccttgtctcctcaaccattcttcaaatctcaatactttcactaattggagctcaggaaacactcatttcaacactcaattcagatcttattgcatgttttttttttttaattccatcaaggaaactgtcagaaatataaatgcaattaacataggattgacaaacaaaatgctgaattcttttatttagtaagccagtgattctctccatgccaagtaaatatcttagtattgcacagcacataaactgaacttatccaactgtttggttatgcaaaacaaatccattgatatttaataatagtaattaaaatttaagtgtcacattccagaaacatttccatccaaaaaaagacactttatagaaatactaattttttaaactgaaagatatcatccaacatttcaaaactgaaacttgtaaaatacaactattggttaggtctacatagatgcatactgaactgactattcttcaaataatgttagcaaaaaaaaaaatttttttttttttttttagacagagtttcactctgttgccaaggctggagtgcagtggcacaatctctgctcactgcaagctgcacctcccaggttaaagcaattatgccttagcctccagagtagctgggactacaggcgcccgccaccacgcctggctaatttttgtatttttagtagagatggggtttcgccactccctgcccagcaaacaaatgtttttaagggcagtaattttatgtgagactgtaatgtaactaaattcctaagagatcatttgaatccaccgtagtgaaagtgatgtttatacgtagaagtggggtgtggtataaataaacaataagcaggacatagtactctgtaggactggagattcagtgacaagtcaaacaagaaaggaggagagaattcatacttcagaacacttcctattagcaattattgcacataggatttgtcccaattctgcatttgcccagtttattctcagaaaatacttcaaaattatgaaattggaacaattacttcaaatgtatgcttaactataattctaaattaattcattataatatctatttatgagtggggaaggagaaaagagtggaaagggaaagacaggagggaagaaggaagaggaaaagggggaaagaagaagaagggaagagagagaaggggagaggagaagggtgggaggggaggggaaaaagggaggggaggccaggtgtggtggctcacccctataatcctagcactttgggagggtgaggcctgcagatcccttaagcccaggagttcaagcccagcctgcacaacctggtggaacaccgtctctacaaaatatgtaaaaattagccaggcatggtgccatgcacttgtattcccagctactctggaggctgaggtgtgagaatggcttaagcccatgaggcggaggttgcagtgagctgagatactgctactgaactcagcttgggcaacagagccagaccaagtctcaaataaataaataaaatgggaagaggaaagggagcacaggggaggggaggaagggagagggaagaataaaataacaatgacttttatcatctagcgtttttcagtacttgctagttccagactatagtaccatatacaaaagagttgagagttgctcacctattacctgcccctggtcattcatccttgacaaaagcatcagtttactgacagactttgtggtttgaggtactttgttagcacaattgcctcccatcctatctgtaggtgttgatttgtatcaggaaggtcatgactggttcctcccaaactattggtccaataaatgaggaggggccactacttaggaaaattgttctatatttagttttaacacctttatagagatgcaactgaaataccacacaatctgcctgtttaaaatgtacaattcagtgacattagtgcattcacagagttgtgcctccattaacacaatttagaatattttcagtacaccccccaaaccctttgaccctcaatcttcaattccccataccccctccaaccctaggcaatcattaatccactatagacttgtctatagtggacatttcacttaaatggaatcatgaaattatgtcattccggcttctttcatttagcataatgttttcaaggtttatacatgtaatagcatgcattgatactgaattctttattgttgaataatattccattgtatgaatataccacatttgtttatccatcagctgatggctatttggattgtttccactttttggctattaagaataatgttgctgtgaacatttgtctatgtattttcaattcttttgggtatatacctagaagtagaattgctggatcatataactctgtgtttaacaatttgaggaactacaatattctatgttttttttcaaccattgccatatattaaaaaaaaaattctctgaaaaaaaaattaatgccaaattctgtcagtattggttcagtttgcggccacacatcttagaccaaagctcctacttaaaattgtcttagttgtttaatgaattaacactgtaagagcttgatgtgcaaaagagattcgttagctagtctttcttcttgatacaatgttccaaatattgccaataaaaattaacttaattccttgaaggtagaagcacttactgataagttcctcactgcaatacctttagtgtttttttgttgttctggaacttcaatataaaatgtaatgttggaaaagtaatgccactaataaaaatatgcaatattttacatccttgtaattgtttacaacttatcagtaactccaacctgaacatattcacttcacccttagagcagtcatttccaacctgctttattttgctgttattgttgatgagtttgttctgttttgttttattttaggctttagcagccagaagccatggtttttagcttctgtctctgttgataagtggaaaagagggatgaggaaggagcttttctggcccaaccagaaacagaaactaagaacccatgactgtattttctcccttggacacccccaccttagagcatttaagttaaaacttctctaatagaaatgataaaatcaagatttaagcaggctaagcgcttccaaatattaaatagatagttacacagctggctggaacttcatactccaaagttcaagtctagatcacttcaagttatgtctgttctaggagttaaaggaatagtgcccggctatgttcatttgtccagtctctactgtcaccttgcctttttacttcccccctcctcctacacacacaatactcaagtcacatactcaattcatgcatatgcagacacagcaagtgcatacaccacacacacgttttctatataccacagacacagatgtacattcctcatacacaatcacctcacagacacacacatcccacatacagacacctcacacacacttcagtcacaaaaaaactcatgcacaggacattcaaatatacacacatcacacacagacttcacatacacattcacaccttacacacacatacaataaactcacatatatacacactcacagaagggaagaaaagttgtgagtttgcaccaccagattacaacgtattggaccaagttttctagggaggggaagttatgtgacaaggacactcatccaaatctctcttaatcttcctttctccagtgctggccaggtaagtggagtcaagatatgctttcaatcttattagaaaccatctgttaagtccacgtgtcatgtggctgaccagaaagcagttatagccaatgacacagatctgctcttaggggaaagaaagtaggggtccctatctcaaatctaaaccacaggcaggatgcagcataggaggatgtgggcattcctaaccccttagccatattgtcaccactacgtgtgagaactgtaggaagtttcttaaactttgaaacgtcagcatatttattatggtaataatacttattggcaagttaggggaaaaaatcacaagtcttgtatggaattgggtgattctgcagagttgcaattgtgacaaataaattatactttctgagacactcttcagttttagcaattacaatagcaaataattattattcataacagtattaacatagcaaatggtcatattccttatagagatagcatttccaagaagtctttaactttttttctaatttgtcatttcagtctctcagaaaacattgtcttctacaatacctgccttttacagttgtcctaaggcctaagatcaaatacaccacataaaatatgaggcacgtggcaagaattcaataaatggtagctactactactattacagctattttcatcccaaccaaatatatacttggaaatgtaattgcaacacaagatattttgagatattgaaaggacaaatttgaaaaacaaaataaagactactcggaagtgctgtctctataaggaatatgaccatttgctatgttatgaatactgttataaataataattctttgctattttaattgctaaaattgaagattgtctcagaaagtgtaacttgtcacaattgttaacaccattgcaactctgcagaatcatacaattccatacaaggcttgtgattttttcccccatcttgccaataagtagatttttttcatcaccaataaattaaggctatgcctgtgccttactctccaaatcattagagctcaaatgaatctaaatcactgaacagattaaagttttagataaaaaataaatgtcatcatttactttctaaaaataacagcaactctgcatatttccctgtaagcttatagtaattatgccattcatatatactatctaaacatttatatatagtatatacatagaacatgtatacaatctatatactttaactcaatgaggagatattgctaacctattgatatttaattcttgcagaatattattcaataaaatcgcaattcttcttcaaactagttcacacttatgttattagttagctcacaacagcagcttaataaaataaattaaaagatagtaagtctccaaagagtgctaatacattccgcatgttataataaggctttttctgaatcacacttttattgtacaaacactgtttaacatttagcaatccaaatttaatcaatgttttgtgttattcctctgcaaattaacacaactcttatcacagatactgaaatatttgaatttccttattacataaaaattcctgttggctttaacctccctatgtaaacttataaactggtttaagggaaaactgaaataatcctttgctaaattatacttaaggtgaagcttaataaacgcatattaagtagaaagcaacgtaaaaaagaataattacaaatataccatttactgttcgcttactctatgccaggtataaggataacaaatttttaaatatatcttatttaatcctttaaaaaagcatgatagtgatattattttctgcaacttatagattaaaaaaaaaccatgaatctctgagtatattatttactaaagtctcacacctagaaagtgttgatcctgggttgctgaattaaaaccctcaagtctggaaactctattccatctacctaagaacccaaaatggagagccagattttttttttttttgagacggagtctcgctctgtcaccccagctggagtgcagtggcacgatgtcggctcactgcaagctctgccttctgggttcacgccattctcctgcctcagcctctggagtagctgggactgcaggcgcccgccactgcgcccagctaattttttgtatttttagtagagatggggtttcaccgtgtcagccaggatggtctcgatctcctgacctggtgatccgcctgcctcggcctcccaaagtgctggaattacaggcgtggaaagccagattttaaaatgagcaattgggtgtttgatgttgcccaaaggactccagcagtcaacaaatatacattgccaatgccaaagatattcctttattgcatggtttaaaaagttggttgagatctttataaataaaaaagtgtgtgtgagtgttcgtgtgtgtgtgtgtgtgtttcaagaaaagtttcagccaagcaggtggctcacatctgtaatgccaatgctttaggaggctgaggtgggagaatcacttgatcccaggggtttgagggtacggtgagctatgactgcaccactgcactccagtctgggcaacagagtgcctctgtctctctaaaacataaaagaaattttaatgcaacttaaatttttaaggtcaagccttctctgtacaatgaaaacctatgcaatccaaggagattttcaccgtcaaaggagatccttatactgggaagggatatgttgaatcagtaaataaaagcaacttttgcagatttgcaacaaatgcctaatgggagaatttgcttagaatgaatcacttgggtgggtgaacaaacttactggttctgcatcagcaaacatagagtaaatagtgtcttaattttctttccaaagaccagaagaattttgaaaagaaaaataaaaccctaaaatattgttatgtcacacaagaagtggaagtaaacaggcagaaaaaacttctaaagctaagcacttaggaactgagtgttagtaaagagaaacaaccaactgcattttggtttcctctgtaagctagctgagtggagaaaactgtgaagaaaatgaaaatcacaactgataagtgcttttcttctcaaggtgtggcctccaggcctttccgataattatgtcataagaagagattaggagtcttcgtaggtaagaagtcttaaggacagtctattcaaaaatgtttttcatttggtactctgttacagctatctcctttctctgacagtgtccagctacagtaacatctatatcaaactgcctaaagaattttagcaatattttgataactcatctatcataatgttcccttgcccagccatcaaagggcaatccttctgctacagtgtgcacgaaatggtctgaaccacaccacacatccttgagctctgaatgcatcaagataccagcagttagaagattcctattctctgacaactctctcataacaaacttgatttattaaaaaataaatattgaagtaggccgggcatggtagctcatgcctgcaatcttaccacttggggaggccgagatgggtggattgcttgaactcaggagtttgagactcacctgggcaacatggcgaggccccatctctactgaaaatgcaaaaattagtcaagtgtggtggcatacacctgtagactcagctactcacgaggctaaggtacaagaatcacttgaacccagaaggcagaggctggctgcattgagtcaagataatagcactgcactccagcctgggcaacagagtctcactctgtcgccaaaataaataaataaataaataaataaatattgaattagtaacttttgcatttcatcccttggtaatacatatttcttctgaaggtaatagtattttattctaatgaactctttctgccccatgtttagtaagcagagctcatttgtaaccatttgggcttcagacaaaaagcttttctaagttttgtttttatgaaaccaatatttaaaaccacttccttttatttattttttctctctcaaaaacaaatgtccatgaggcttcattatttttttcctcccttttctaatttcttctttttgaaagtaatttattttctaaaattgaagagccacctgactacagttactttagggtaactgaatgtggttgtgcttttgccttttaaagagttagttctgactacattcatataaggctttgttttcaaggatgtctggaattcaaacccctgggactgagaatatcacccaggaaaaaaagatgccaaattgaactaaaaggctactttacaattttgacctgtggattttatttaatgagggacaatcaacaaggctaagtaaaatagttcctggaatatgtctgacagtcatatgaataggataaaagctgctgaaacagtgctcaaagcaagttatcaccaattctgaattctgaatattgcacctaaattcacaacgataatagctatttttaaaaataccactcattatgtcttcaaactctaatctaccactcttagatcataatgccaagagtaacccctactggccagtctattttatggctaatgctgaaaggatacaggagaaagggtggttttactgatatatttataatcccaggagcagtttgccagcactgcattttcatgataatattatatatatatatatatatatattttgtcatctagctcctccagtgatactcctgaagatttaacatactttacttttacaaagttttaataactataaacatgttgaacattttaaatttctggcaatataaataatatttctaaatcaacagataaaaggaattctgctcactttaaatagcttttccttagtattactttctgaagagggcaaattatcaaatgatgtttaaaaactccattacctgctccaagttaaggggcgagacagggcacagaatgaatacagtgggggtgtgtcattaggatgctaatttacacaacaaaaattaatgacagataaagtcagcagcatgttgacatgtccagcccacatgccctacattttgtctacttacaaagtgacatatgactctagatgtttgcataagcaacatggagattcccttcattattgcatgtttaggttgctagtaattgagtcatactcctgagctaaattaggtaaataaacttgtgtataaggaagttaccatgcaatcctattaattttccatatcaagatatccaggaataaagcagaacttagacagattctagaaaaaatcacacatagggcaacattctcacttcttcctggcccactgcatctcttgcattctttatgggtttgtaaaaatcaggttaaaataaactaagtgtagttcatttcacacaggaaagaaagtataaatgagcattgtaggccaggataaagctgtggctggggataggcattctgtcctgtttgcctggggtgctaattttatgaacattatatgctattatagactatattattgttctcaacaattcactcttttgccacttgaatgttcaggcgttctgggaggggggatatattgctgagacccattgtctggttagccacaaacttgcttgggctaatggaatgtgagtggagatgacagtctgtcattttagatcaaaggctttaagaagcattacgtgcttcccccagcctcttgctctttaccctgggccacagttccgttgtcagagttccaaccagctgtactctgggcaaggttgagccatttcctctactttcttctaatggatggaatggtctaacccattgaattgacaggaaaacaagaaaatactttggctggaaagaaactcttacaagagctcaggctaaaccctaaggaattcagacttctctttgaaaatcttatttgtcaatggtcacaattcaggagaaaggacaaggtatactgcaacacctgggcctcatttttgctgacaatggagcagatggagtgattatctgtaaccttatttgcactgaccctgaatatctgttgtttgtcaaaaccatttgaatccttttagtttcagtttcccacacgtataatcttattactcataaagtttactctaaagcaaggtttaaaatgaaatctcatgagaattaaacatcatttgtacacttagattgccattcttaaaaaagttacataaattcagcagaaagaaagcactattttaagaaaaccaccttatcctctccttttaattgcttctaagaaactgggcaaaccaccctcaatgaaaataatttgaataataacatatccgttctcttatattttaattttataatattccatatgtgaaacaatggggtaaatattgaagatgagagtgggtgagagtcctagattccagaaagataacttttacttctgctatttattattaattttcttcctttcaaaatagagttttgtaaattgcagctatttctaattctactcaaacctttgacaaagaaggagatgtatacacaaacacattaaagaaaaaaataaatggttacattttaagttggaaaatattattccactttaaatatatcctaagtttaaagaaagtatttattgtgagccaaggcttcacattaaattttgcaatttgtctccttaatacttctagaacaaaagttaattatttcttaaccacttacataggaaataagatttagaaattactcaactcacttatttctgctgatatttttctttgttttttttttcctttgagatggagtctcactctgtctccaaggctggagtacattggcgtgatcttgcctcactgcgacctctgcctcctgggttcatgcaactctcctgcctcagcctccagagtagctgggattacaggtgcctgccaccacacctggctaatttttgtattttttttttcagtagagatggggtgtcactgtgttggccaggctggtctcaaactcctgacttcaggtgatccgcttgcctcagcctcccaaagttctgggataacaggcatgagccatcgtgcccagcctctgttgatatttttcaaatagaaaatcaattttaagtttttctttatcatatgaagcaaatattaaataatcattttatttagtctgatgcttgcttgattatattgtgatatttctaataatctattagattttataataacaattataataattgtttctaagcaaatgaactattttactgtatgttcaacctcctacagaacgctgtataattttctaaataatggaatctatgcagcagcgggatctatttataaattcactgcattttcagtgtcattattgggatatattcctgagtaactgctgtggagacagaaagtatcaaaatatacagcagaaatttgaaccatataaagcctgatgggcctgacaaaggttaacagaataacataacattcagctctactccttttctcaccctcgtctcatctcaaaatatatgcaggaaatgcctcctttttcaacctccttcgcattctgaagagaatgtagaactttgttttaaaattgaagccaatgtaaccaacatttgcctatttttaaaaagctcttccttcattctgattggctttagaaacaggcctaatattgacaagaaatttatagagttagtgagagttttcatgctaatatcaacattttattcttttttgctcactcagttcccaaagatggatgtatacaaatgctgtagaacttcatacatgctttcctacaccttcatttcctcctcctcaaaagattaataagctctgtttattgacgtttttgtggtaagagtgatgtaaatatctcaagccatataatcaagttgtcatgttggtctaggcacctacaatacaactagatctgtgatttaccaaggtgctatgtatgaatatatttattttgacaaacacaaatcagttaatattttgacaagtatattttgataagtataaatcactgaataacagctttcatatatattatttcattttaggtttcagaagtagtcaacagttgattcatgaactgcttgccttgcttgtagaaaatttagcagacaggagaaagaagaaagaaaaataaataggcaaatcccagactcattcctgccataatggtttcattttgcctgttttatatatcagagttttgtgaaaaatttcattcataaagagaggttttctgattttttaaaagataaaatttgaaaatgtctagcagagagctcagtgcctaaatctcagaaaatatttaaggacagagagaaaacatgaaaaacataaatagtatctgcaaataaggttgataagtctaacctttctatacttaaaagaaattcagcttcttaaatggcagagaaaattctgtatgccagattacaatgaatatattctcgtcattatcattatctttagatacttccagttttctgtggatagactttgtaaaatgccatctatctccaaaaagaatgttactaacacccaaggaaaaacaagtttgtagagtcatacatctaattaccaatataacgtaatgattcttttcattatcatgaccctctgcccctctgtagtgacatgtccccctgaaatttgacccaaatagttcatacaaataaagttgcaatgtctccagtcagacatgaactgattgtcttcctagggtctcctggggtagcaacagtcaatttgccacagcagaaacttgagtatgcacattgagttccctccaggtattttggcaagcaaagtttaaaagcaaccatgaccttgtcaccaatactaatggacagacttcagacttctctgctttatgttagcatagttgctggagtaaggttacaatgttctgaggactattattgatcctgacattccaaacaactgtgagttgatggagtaattatcttatattcctgtgaacagactttttctgcctcaggtcactgaaccatttttatttttcccaacataaaatttctatccaaaaagtgatctaatccacctgaggaaaaagactataacttcatcacattcagaataatctctcctcaggtcctctaccaaaatgttatgattgctttaatttccatattgcccatgtacagaagccaacaattattgcagcataacttagagagtacaaataagctgaaatgaccagctatgatctgaacattggcaccctcccaaaattcaaatgttgaaatctaatcaccaatgcaatagtgttaggaggtagggcctttgggaggtaattaggtcattaggcctccagccttgtgaacaggattaatgcacatattaaagaggccccttcttccaagttatagctcccttgccccttcttccaagtgaggacacagcaagaagacaccattaatgaaccagaaacctggccctcaccagacaccaaatctgtagcatgctgactttggactccccagcctccagcactatgagaaataaatttctattgtttataagctacccagttttttgtttgtttttgagacagagtctccctctgtcggccaggctggagtgcagtgggacaatctctgctcactgcaagctctgcctcctgggttcaagcgattctcctgcctcagactcccgagtagctgggactacaggcatgcgccaccatgcccggctaattattgtatttttagtagagatggggtttcgccatgttgcccaggctggtctcgaactcctgacctcaggtgatccaccggcctcggccttccaaagtgctgagattacagccgtgaaccactgtgcccagccatgctacagagtttatgatattttattgtaacagtccaaatggactaagacatgacctaccttactatcagtgccaaaaagactaattctaccattccctgggatctgaagataatttaattgtcctttctctaaaaataatagtaacaaccaacaaacaaaaaatctccaaaagtttattttagaaaaaaggtctaaggaattctatatagttcttgataatttattaaacatagtcacaaatcttttggaatttttcagcaagcaataaagtgtccctgcctaagcaggtttttaaaagctattccaaggagaagccatacagttccgtcactgcatttggatgctgttgctgtgcactttattcataggaatgcatagcgtggcttactggtactgaaaaagactgctgaatggcagattttaaaaagagtaagcaactgaattgtaaaaggtcctagcaatgatagattccacaacccgttagaaatttgcccctacaaccctcctgacttctgaattccaagaagaatgaaagtgatggcttataattagcatgattgtgttaggggcatgacagatgctgtcggccagccttgatgtcagagtaaaatctgtttcctcattcatagtccagctcttttttcacatgatggactgcagcaccctctttctgattacaggcactaggcttcattgcatgttgtaaacatatataaggcagagcctaggtgcatgcagatgataatgtgtcagtctgggtcaagtgacagcttaggaaatgtcaaaatgaacaacaaaaacagagtaattctatgaaatggacaatgtgggtggatattacatttcaatattattaatgtctaactcaaaaatttgatttgccaactgaagtccatttagcaaaacatacacattgtcagttagcctgagaattttcactaggcttaccccacttccctcctagaatttttttttgggggggaggttctgaaggcattatttttattgtgttgtgttgtgttttgctgtgttgcgttgcattgcattgcattgcattacattttttgagacagagtctcactctgtcgctcaggctagaatgcagtggtgggatcatggctcactgcagccttgacctcctgggctcaattgatcctcccacctcagcctccagaatatctgggactacaggtgcacaccattactttgcttccaagttagacataactacttgcatggtctgcttgtactcaaactcagcaaatcacacccagcatctcctcccaatttagcatcttctcatgatttccctatttctgttcctggatcattattctcccagtcattcagacccgaacctgagaatcatcttagatgtctcactctttttcaagcgccatattagtttgtgtaatatggtatcaaaactttgaaatttctgtagcatctgtccctgagtctttccatatctatagtcatcaaacttagctccacattaccccttgctgagtctaacccactagtcttatatttcttagatcacacatccagtctatgttcccacgaaaccattcaagatggatcttcctgcggcattccatcaacatctgcctgctaattctcttcatcctgtacctgagcttagcagctcactggcattttctccaagttgtaccatacttcctgtttttttgcccttgtccagtattctttcctctgtcttcaatttttctgtttatacttctgtggaaatcctatccatccttaaaccttaaaatgtggagagtgtgtccttaagactgcatataatgactatagcagttcaagtctctttgatgttgactaactgatattgaggaaatatgtcaattctgtgggattcaggtactcctctgtaattgggagtaaagggagaagaggataatactttccctgcctctgtcatatctatcatagaataattaaaatgagcaaaaactttaaatgagatgaatatgtaaaagcaagagtaaaagctaacatgctatgcacagtagaaagccttactatgatcatcctctttactgttacatattcaccacatgcagatgaggcttcctcctgggattccacttattttcatcactattatggtcaatactatgacttatctttcagaattagttagcaggtatggtggctcatgcctgtaactccagaactttgggaggccaaggctggaggattggttgagttcaaaagttcaagaccagcctgagcaacatagtgagatcttttctctacaaaatttaaaacaatagctagacatggtggcccatgcctgtagtcccagctactcagaggctgaggcaggaggatcacttcggtccaggagtttggggctgcagtgagccatgattgcaccactgcactccagcctggacagagtccagagtgagaccctgcctcaagaaaaaaaagaagaagaagaagaaagaagaagaagaagaagaaagaagaaagaagaagaagaaagaagaagaagaagaaagaagaagaagaaagaagaagaagaagaagaagaagaagaggaagaggaagaggaagaagaagaagaagaagaagaagaagaagaagaagaagaagaagaagaagaagaagaagaagaagaagaagaagaaagaaagaaagaattagttcactgacttaaaaacaggcctactgagggtcacagattcttttggaatatacatgcatatttggaggacagaatcacaaactgtttgacacattcagttaggttatgaagaaaataaaaggctttggttgtaatatgatcagatggctagttccctttattctttatttttgagatggagtttcgctcttgttgctcaggctggagtgcaatggcacgatcttggctcactgcaacctctgctcaccacaacctccacctcccaggttcaagcaattctcctgcctcagcctcccaaaagtagctgggattacaggcatctgccaccacacccggctaattttgtatttttggtagatacatggttctccatgttggtcatgctggtctcaaactcccgacctcaggttatctgtccgcctcggcctcccaaaatgctgggattacaggcatgagtcaccgtgcccggccttagttccctctattctaatgtaaataaatactctaaataaatgtataattcaaaataaatatttacataaatattgacagatgaagtgctttttgactcatgctgaagttaactagctgccccttgaaaaattagttttctccattaaattattaaaatttaactaattctggagtttttctatggcatgctggacataataggaaccatggacttgctgagagtcctagtctaggagatttccttccagcacctgaaatacttcatgggagaccacagttttcattccatattttgatgttacaatatgaaccataaaaactttcttctatttctattttttactttttgcaagactaaagacaccccccccaatagtccagaattttattcctactttcttcctttttcacttgagaatgtagaaacaataaataactcaaatctacattttatcagtcagtgccaccatttaaaacacagcattttgggcatgatttcatttaaccccttaattgtatagttatgattccataacactgcacactgtctattccttaaaattttcttaagttttactttcacattatgcaaaattaattaatgctccactctgtggactctatgccaccacaccactatcaatgaattcagaagaggcagtgggagtgttgatagaatgtaacatagcattatggtagagtacagactagattacttgtttctcagttttctcctctaaaatatggaaataataataatatatctaattcagagtttttgtgaagattaattggtttaatacatataaaatgtttagagtagagcctgacacacaagtactctgtaagtatcatctattattgttttgttattaataaaggactccattatttcacaaggtaggttaagcatcattaatctgaaaatccaaaatgcaaaatgttccacaatccaaaactttttgagtgctgacatgatgtcacaggtggaaaattccacacctgacctcatgtgacaagtcatagtcaaaacacagccaaaactttgtttcacgtacgaaagcattttaaaatattgtatacaattattttcagcctatgtttataaggtatatacgaaacataaataaattttgtgtttagatgaaggtcttatccccaagatatctcactatgtgtatgcatgtattccaaaatccaaaaaaaaaattcaaaggttgaaacacttctggtcccaggcatttacaataagagatattcaacctgtatatgttaaacatatactaattcttaaattttttgagagaaatgtaattataataaagtggaaaaaactatatcaggtatgagtattaatattttggtttaattactgcaatgatcaacatagctactttaattattattctcatgagagtttttactttttttttttaaatagatggcggtcttgctgtgttacccaggctggccttgaactctgggttcaaatgatcctcctgcctcagcatcccaagtagttgggataacaggtatgcactattacaaccagcccatgctaatgagaattttaatgcatatacacacaacatatacccacacactttcaacacacattttcattatacagagtgtttccataggtagagtagaatgagatatgagttctggttatttagcctggcaactgcagcagagtcaaatactgttagtgtatctatcctggttcatgtcctgttatcaatacaagaggcaaagtataaatggagatcaggtttccatctggttacaactaacagcatagccttgattgcctgctttgagttaggggatcaaaggaagaaatcatcagagatccaaatagcaactcaggcaggcagatcgccatttgaaaaaaaatagtaacttctctaccttaaggaaggataactcctgtttggctagcttgattcctttctaattataaaaataagcttggggtgagtagcaggggataaaaatacaaagtatcatataggagttaataaagaaaacaatcatgataattatctttctaaacagtaaagagaaaccaagtatttcttcatattagaaatataatacaattttacagccaggcatgacgactcacacctgtaatcccaacacttcgggagatggaggcagaaggactacttgagcccaagaattcaagaccagcctgggtaacatgtccaaaccccttctctacaaaaaatacaaaaatgagacaggtgtggtggtgtgagcccgtagtcccagctatttgagaggctgaggtgggaggatcactggagcccagcaagtagaggctgcaggagccatgatcataccactccactccagcctgggtgacaaagggagaccctgtctcaaggaaaaaaaaaaaaaaagtaaagaaataatttttttcaaagaaaccctttacattaaaagcactacttatgatggaatctttaggaaatgctagaattccttgtccctagatttttttctaaaggattaaaatcttcattttctaggagaactgacatttaaatgtatgattcctaaactcaagatttttaaaagatctgagttgctcgataactctatagcacactcttgaagatgagatattcatggaccctccctaaatcttggaaagtcttcaggctaacggcagggctggagctaaagttgaggcagaacctcatttctgccagtaacagcatgcctagccaggattaaaaaatttgccaagaccacacagaaagagactagatggtaagttggatttatacttctctttgcaactgaaggccattctgaactcctgcctaaagttggagaaagtgaagagaggccaaatccagaaaccattagggctcagagataattattatggaaaaccaacaagcatgtacctaatgattccccagagtcactcctagagcaaggaatgaaatgaaaaagtttatatcacccacaaaacaaagattcaatgcagtcaatgaaccaaagaagaaaaattcagctctgaaatgtgataataacctgatattcctcctcaaatctctggatatttggttacattataatttgcttgatgcacgtattcttaaaataccaacactcaattaaattcatcacctaagaaacatggtcattagtaattatttttgcataatctcttttcatttttattactgcaaattttttgtttctaagtccacaaaaggaaacttcaacttgatgtaatacaaaaagtccagagtgtatcacaaattaatttatctagaatgtaatcaccatatagaaaaaatgatgcatatgatcttaaaattgcatccaggtttaaagttctataaaaaagataaagggaaggatgttactattctgagctgatgatgtcttaccatcccaaactgtaaccattgaacatacacatttattgacaaactgctttgaaatcataacaagatgtctcacaaatgtattgtgttttgatgcactagtgtcttagctgtatgaaacagctacatccatgtttttccatctataaaaagggcaatgaaaagatatcctttgagtcacttttaactcaactttctaagtgtctccaattttataaacatgaatcatactcctataaagaagtcttccactccaccttcacgagtgtatatctttgatcaggaagtttaaatggacactctatatgcatccttgtgcttttggggatctgacaatcctttttttgatggaacagtaaatggcccaactgtttgcctaagactaggcagaatgcaatttatcttcttggtttgcagaaaatggctatgtaaactttaccacatttgccagtatttccattccttaagacatagctcattgactaggacccagttttccaagcaagtataagatgtttccttgttactagtatgtttttggaaagcaaaagagaccttccgaattacctcttagaggcatgcttcacttttgtcctcagtaatgattatttcaatatactgtttacaaacccaatcgttactccctttttgaatgcaaagtaacacgtgctaattgttgttttgatgatattagtgaatcaaaaccttatgggaaatacaattgtctcatcttccaggtttctatgtgaaatactcagaactgcacttgcaaattcctgagcagcttcattctaagggaagcatggcgccatctagtgatcatacagaaaattacatttatgcattttctctcaaagctctgtattaaaatgatgagttggcccatacattagaattgaaagaagagaaatagaataaaaattcctagaaactttacctagttatttgctatatgcaccatcctgcatggtcattattaaacatatatgggttataacaataataatatgacattgtccctctcttggggtcacttttttaacttcaacttaccattggtttagtcatgtagtttccgaaataaatatcttcacatggaacatttaattccaatgaactatatttttggttcattaaaagttaatgaagtttttgaaacaattccaaatgatctgtaaaatatatttacttaaaaatgcttcattttatttctctagtgatgccctgctaggatgctacctaaattgttaaatatttaaaaacacagaggaaaaagtaagataaaataaatagcatactatttagagattaacctattccttaatatggaaaattattcctcattgtcagaataaaacatattattgtatttctagtttaaggataatattgtacagatatcaataggataagatatgcttgcctaagccggaatagatgcccactctgtcccagcagggtttttccagttttaccctgtggaaagttctatgaagacaaggaccatgtctgatgcatcttttcatctccatacgccactactcacccaaccctcgcccccaccagcacaatgcctagcatgtcataggaactcaggatgtttcttcaatgaaccaataaattaatttattatgtctgtctctaaaatcattatttagagtctatctaccacaggaaacagcttttcacttttctattgtatgattctctgctccttttctgagatactctctctacaagtggcaccttatttgatattcacactgccacctcctaaattctttaaaatcttgagtatccatgtccaaatggctttctttccatgagttatccatcttacagaaagggcattattcatcaacacatcatttgatgaaataaatccaaaagggtggaaatgagaaactcttatttcttactcttttcaataggtagtattaatattctgtaacaaggagatttcaatagtgtaacacataagatattactcacaatttgaaacaggtgcttttggcattataggcacttggccacaatgcatagtttaatatttgtgtggctcaaaacagctaacttatcttgaaatgttgcagaggaaacttccttaatcacattcttactgtccagtgactgaggtaaatcatggcatacatgcgtcattatgaatcacatactatctatacctacacttcaactacctgtaactagattttcactatacggtgtaatgagtttcagtgagaacattcagataacccattcctcaagtaaatattccaaaagcattttatttcactgtagagaaaatttagaaaaagtagatttctccttctctagtattgctgaattgtgattcaaatctataatacacagtaaacgtctcagaatactactacttttgaagtacaaagattgccacgatgtagaatagaatggctttttgtttttaaccaacatccccatcagtacattcaactcagccttgcaactcccactcataatgtcacaactgtttgtccctaagctaattaagtgtgtctgcgagctgtagcgtgagttatgaagttatcatttctccacactttatagctgtttgaaggatatgaaatggcaatggacaaacagtcatgatatttttggcaaaatatcaaatgtttttgatggaaagtgaaagggctttggagccctctgacctgggttcaaatcctaactcttctactttatagcctgagcaagttactgaacttaagtttctttatgtgaatgtggagatgctcttggacccaaagttctaattttggcacatacctatctttaaaaacaataataattttaaaagtaattttgaaatgtgttggtgaaaaacgtaggcttttttgaaaaagggtctctcactctgtcacccaggctggagtgcagtggcgcaatcctggcttactgtagtctcgacctcccaggctcaagagatcctcccacctcagcctcccaagtagcagggactacaggcacgtgccacaacacctggataatttttttgtattttcagtagagacagggtctcactatgttgccctggctgatctcaaaatcctgggctccaattatccttccacctcagccgcccaaagtgctgggattacaggcatgagccaccacactcaaccaaaaaatatagtgttaagagatcacactgtgacctataacatttatatatttagaacacctttggagctaactgagattagggatcaagatatatgtatatgtatatacacacacacacacacacacatttaataacacaagcatgcacttttgtgaaatagaatacgtaagttctaagcaaggagagtgcaaactgcatttatttttcaaaaacaagaaaaatacagtcataagaggttttaagtaactagttttaatcaatccatatggttgcatacttagagttttcttagaaatacattttacatttagcattgaccttggtatgtctaatattttctaggtatttttcacatatttctaagggctaaaaatatttattcatttatactttcattcagtcaatagatatttattaacagctttctcttatccaagcacatgtttgggaacagtcaacttttgttttatgatacagattaaaccaaagggacatattaatttgtgatcaactaataaaccaacagagagcttctaaaagctgaaggattttctaattttacagagcataaagaaccattttattcattttaaatctcaaactatgctgtgtttcataaggaaatcaaaggatatataaggtgtatacacttaggtacacatatatttttagatattttttaaattgatacataataattgtacgtagggatgtttcaatacatacaatgcatagtgatcagatcagggtattagcatatgttccaacatttttcatttctttgggactattcaatatcctctaagtatttgaaaatatataatatatcgttgttaactatagtcatactatagtgctatagaacactaccacttaattcctcctatctagctgtcatttcgtattcttaacaaatatttctctatcctccccttctccctactgtttccagcctctagtaatctctgttctcctttttacttccatgagatcaactttttctagcttacattttttgagtgagaaagcagtagaaaagaaaatgtggatggctttaaaaggaaaaaaagagaaaaaacagccctatctccaaatactccaatcttgtgaattgaaaaaaaaaagttgagatctttttttttaatcagttgctatctatttgtatatatacccacagaaaaccatagttaaaatgtaggcattataattctaagacatatgtacagaaaggcaaatgctggggggaacatattaaaatgtttctctgacattttgcagtcttacacagtgatttaatttatacgccatccatatattagtgatctggactctcttgatccaccaaaaagcaccctacttagcatttatctagtgttttctaagtagacgtttaaggctctttttaattaatcattttattaactcttgtcacactaatagagacagcaaccaacctgaaccatctagggcagatgagcaatggagatacacagaaagctaagttgcactgaaaataattttttgagaaagaacaacgggagctgtggagttctccaaatcataagttataaagctcagttaaattacttttttgtacaatgtagacagaaatgacaaaatggcagttctatatgcctgtaaaactcaaactgaccaaacactgacacttggtaacagcaggatgtgtactgatgttactataatgatgtttagcagaagagttgaaaatagaaagggtttccgaatcagcccagcaccaaccaagtaatccagggatccagatcattccaatacccagtgagttgtcccctttggcccctcctaggtgtgacccatccaagagaagcattgtatttccctagtctacattgttcccactttgacacagcctatcatatacttctctgtaagtttatgattatctcctccattaaatttttaattcttggggaccaaaaatctcatttctctttgtatgttcaagtgctattaagcacataagtactgaacaaatgctaaatcaacaaataaataatcccatgattacttaaaactgaggtgcctgcacaaatcagcaaggcactaaaatgataaactcatcctctaacaattgatcaaataccttaaactcagtctcaaaaagagtaaaaaaaaatgtcttggcttgctttcaagaaatgagcaatgttaaatcaaattcttgctagattattttcatggtaatagtttttcacaacttcttattgtaaaagtaacaacattatttcaaaatttaattaaggtataaataaatataaatacaaggagataaagaatatttataatcctattactcagagttggtttcatactttagcccatatacttaaaaatgtgtaaagaattacattatgtgtagttttgtgacaaatttcaatgctaatatctctatcattaaaaaaaatatggaagtaccacaatttagtctgttttagttttttgtttgtttttgagatgtagtctggctctgtcacccaggctggagtgcagtggcaccatttcggctcactgcaacctctacctctggggttcaagcacttctcctgcctcaggcgcctgagtagctgggattataggcacctgccacagtgcctggatatttctgtatttttagtagagatggagtttcaccatgttggtcaggctggtcttaaatttctgacctcaagtgatccgccttggcctcccaaagtgctgggattacaggtgtgagccaccgcacctggcctgttttaaacaccaaccctccctagtcctttactattatcaactcattgacggtcaaaatacataaaataatctttgcctacttcttgttacttgaggataaatgtctacaagaggcattgttatatgcatattttgacatggagtgttaccattgtaactgtacaaaatttacaatctctcaagtaatatatgtgtgcctgtttctttacccctttcctagactgagcattaccaatctttctatttctagtaaattgtcaaattaatctcagagaagacttagagacagtcttattcacttagtttattttctctcatgtggcaaaaggcaattataataaaagtcaacgtttacttttaactcatgatatgtattacacaatcggcctctcataataactcaatccttatttttataactctgcaatcaggaaggaacaataaaatttaattccaatattgctaaacctaggataattttgtagactagagtgtctaagtgtcatagtaacaatggctgaaagaaaagatgtttttccataccaactgaaatatatggattatcttggtacaacaaaactcttctaaatttattttattttattagttttggccacatgagaaacagcaagaaattccactgctagtcctccaaataggtaatcagatatatctgtggttatcttccctccataaacatttcctagtgattttgttaactataattctgtaatacaaaccctttgggtaatactcctatagacatcccacaatatatgcactccacacaaagagataaatgacagttatcttctgtaatcaagctcctgccaacttaaggtaagtaatgtatgagaaagataacctaatggcaaggctggcaagtcattctactatgtgtactaagctctttctcaacatcaagtaaccagacttaacaatgatttaaattactatatgaagactttcatggaataatgatttaatattttgacttataacaagactaagtataagaacatcactatttattcatgattaataatgtacatgtatgtaactcacataaaaatactattaaacatattattgctttactttacacaaagaccctaatgaaaagtcttataattaattatagaaagataattttctctcaagacataaatattatcaggtttctctatttgctgtatctttgaggaagctattaatattttaagacctaaacttaactccaagtacgaaatacacttttacatttgtgtttctaacttagctttacataggcattttatccatttttaaagttaggattgcttaattccttttttgaaacaaaaagcataaaaaatacataattaatggcattgcttttatacccaacttttattatctacaataaagatgtgatcatgtacaaataaccagatatgaagagccacaaacccacatatgcatttggaatttactcagaactatgtttgaaaatactcatgcactaacatttgtcccgttgtttccagattatcctgaagtttggtccaagacaaacttgttcagattttctgatttagatcacagctctatactctaggaaaacatggatacctacacctcagttaactgagtcttaaatggtgctagagatttcttattattaaggaaaggaaattattagttgatattttaaacatagaaacagaaaatatcattccagattaatcgattcaactctagatgaaaacaaatttatatattaaaacaaattaactgatccatatttaaaataagtaacagaaccgtgaagtgagtggaagtggctgtgagaaaagaactaaccaagtgaattttgagtacagaattaggcatataaaacataaataatgctaaaagtctacttactgaaatacttttctttgccttacttctctttttccatagaggcgtgagtgggtaattctgaaagtaatttttgaaaccacattccacaggtaagaaaatcctatgcaatatataatatattgtgaataatgggagccaggcttctcaccgtaacttctcacagagttacagatacgaaaatggagaagaacagaatgagcactgcaatgatggattatcattgtgaaatcctaggtttaatgtatacaaatatctgaatatacccatggatataggtatgtgtgggtatgcatatatatgcacacatttatatatgagtatgtacatacatacactttccccctagatatgtctactaaaaggacctagaagcaaaagcacacctactctccaaattttgatttctaaaaaccattctttactgaaaggaaacagagagccctataaaagtagctgattccaaggcttggataaaagaacaagagtctcatatctaaaaccaaaaagtaaaaaagtactcaaagaatgatagtaacgtgttaaaatgacaagggagtcaactagaagtaccttgtactgtccaaatccaggacagtatgaggattaagataaataatgatattaaccaacaatattaaaggataacaacctgctaaataaagaattcatgactccacacagaaacaagcacgaagaaacatttttatgcataatagaaagccaactaataaaagaggaagaaatgatgaaattacaagatttccccttagcaaaccactatggtttgaatatgtctcccaaagttcacatcttggaagcttagaccaaaacgcaacagtgttaagagttgggacatttaagagatgattagatcatgagagcattcccttcatgaatggattactttatctgttatcataggagtaggttccttataaaagaatgagtttgggccaggtgcggtggctaaggcctgtaatcccagcactttgggaggctaaggtgggtggctcacgaggtcagcagatggagaccgtcctggctaacacggtgaaaccccgtctctactaaacaaaatacaaaaaattagccgggcgtggtggtgggtgcctgtagtcccagctactcgggaaactgaggcaggagaatggcgaacccgggaggtggaggttgcagtgagccgaggcggagtcactgcactccagcctgggtgacagagcgagactctgtctcaaaaaaaaaaaaaaaaaaaatgagtttggcccccttctccctatttcttgcccatgtgatacctttcatcatgtcatgatgcagcaggaaaaaggactgcaccagatgcagccccttgatcctgaacttctcagcctccagaaccatgagccaaataaattctattcattataaattacccagtttgtggtatctgttacagcagcattaaaccaatgaaaacagcaaccatcataataacacaagtaactgatttagacaggaatcaccaacggattccaaagctattgggtaagaaattgaggaataacagcatatttacatgctctcatattatcatggtacaaaatgctttttaattacaaaggaggaaaatagtaactttacagtggagaaatctggtaggcaccacttgaactaaatgatcaaagctaaatttgtcagtaatggtactaaacaacagcatctacctctggatataaggagttagcatccctactgtgatattcctgcccaagttgtatgacctgactatcatccccaggaaacacaaaataaactcaaattgaaagatagtctatgctttagactgaatgtttacgttgcctccaaattcatatgttgaaacttaatcagcaatatgatggtatttacaggtgtggccttttggaagtgatgagattatggggacagagccctcatgaatgggattaatgcccttataaaagagaccccagagaactctctcttcctttctgccatgtaaaaacacagcaaggagacagctatttatgagctagaaagctgatcctcaccagacagaaaatctgcttagcacagatcatgggatttctcagccttcagaaccatgagaaataaatttctgttgtttataaaccatgaagactatggtagtttgttatagcagcccaaataaatcaagagagtgtacaaaacaattggcatgtaattctccaaaaatataaatgtcatgaaatagtctttcacgaagactcagaaactgctccagtttaaaggatattaaagagacatgacaactgattgaaaagcatgattttgtaatttcattggctacacagaacattattgggacaattattgaaatttagaataaagtctgtagattagataacaacattttatccatgttaatttgctaattttaaccactgaactgtacctatgtatgataattccatgtttttaggaattatttaagtatttagaagcaaaggagtatcatgtctgcaacttgctcttaatgtgtatcaataaggaaacgtgtgtatgggtagacggatacatagatgattagatagacagaaaggtagatatgagagacagagattgaataaagtaaatgtagtaaaatgttaacatttgggggatattggtgaggggtatctgggaattccttgtgctattcttgccactttacagtaaatctgaaattacatcaaattaaaaatcaaaatcaatataatatattaactttatggcttatagatatttaaagttagaattgtcaagtgacattctggtgaatgcttcaactagttataactattttccaaatattataaagcacactcagcataaaatcctgctttttgataccttacatatttcgaggacaactagatttttcagttatgtctttataaccacactgtacagaaagtaaatatatatcgagcagaaaatagctattcgtgacaaatctcacacctgagattaagagtctgctaaatcgttccattacattttggccttatgccctatatttttatcttcttttatcaaaatgtgatttcttcattgtaatttattagtagtttttagatatagacaacatatttaaatatatagtatcaccatcttttttgtttggtagaatcataccattttagtatgccataacagaattatatacatcaatatttttgtcattcagcctggcccacatgactctgagatgttctgaattggattgggctcatagaataaagtccaaactacttgccaagacccgatgccccatataatctggctttaggccaattttgcagatttctctttgaccgtaatcccataaattccctatgacatgcaaggctctctgtactacaaaccttttctatgctccttcatataaccatgaacttgaaaatgatgcctattcaactgtcaactcctaacgagctagtcaccctccaagacaaaactcaatgtcaagtcctgctttaaatcctccatccctccctgagcactgccctcccttctttcccaaaaggttattcttccttcttctgtctcctcatatcttttgctcatacttcaaacatttctgtcatattttaatgtattctacagtattatcttttccattagactgtcatgttttatcatttttttctgatcctctcccccacagagcatagaaaagtggctagcacaaatgcagctctcgataccatttttttgaataaatggataacaaaaaacaataaatatcacagaaaaatacaagaatttttgaattacaaaagagaatggtaattattagccactaggttgtacagagtaaccttcatgaaggaagtggtaactgatttgggcatgaagaatgagtaagatgtggagatagaaggcattgtaatagaaaataagaaacagaaagaaccaagatctaacagtctctgtgtggggccgtgaggatatgctgcagacctccaactataggaactataaccagcaaagggccccaactgatgcctctgaaattcactgcaacattttagctaaggccatacctcccatgccctgcttcctggtatttactgagcacagagggcatgttgtggcagacacattcctgggaaacaggattcctctgatggctgattttggcttgaggactcccatatgcctttggctagcccaatcaaggatgctctcaccaattctctctcccttctttactcagagtcaaacttggatcatgctttgacgtttccctcagccttaactggctccctccttatattcctctacaagggcatttcctaaaattcttgcatttctaatcccattttggcatgggcttcttgcaagactcagactaacacatagagtatagagtatgtatggagtaaatagggaattaaagctgatgaagcaaattgggactttgttactgagaacaacatgccaattcaatacattgtgccaaggcaggataaatctttattttctaatacgaacataactgtctatgtagtttttagatttcacaagtggcaaggaatttataacttccttttgagaactatttcatagtttaatcatctttcacagctcacgtaggtctttactaaatcctttgtgatttaagatcatttcttccagctcttctgtggtgatagattacagccaactttagacatactaaattaactacatcaactcttagtcataacaggaattccttctacaatattatgcacacatggtcttgcagggccatttgtcactttttctatttgatacaaaattatttctcattaataatctaatcatgaaacacctgtttgttaggcactgaaaaaattttccctgtttgaaagcagaaaaacaaagatttgtatgtttacttcagagaggattttgtgatttctaataggaagcaaacaattgtttttcttttctcaagtcttttaaactactctgccttctattgacagagtaagaaattaaatcttcaattatttaacatagcattttatctaattaaaaataacagattttttttttctgccaaagatttgaaacagagatggaaagcatgtgtgggaaattctgttacctttccagatctctgcttgaataaaataaaggcattttctgaccacgataagcacactgtctgatccagatcctccaagtatgcaaatcaacaggaaaagttccagcagcaagacttacccatctgcacagagtttcaaaaatggtgatgtacttacctaaaatagaaagagagatgacattagtgacattcatcgcagcttagacacatagtgaaaaacacattctagaaggcagttagagcatctgttcccctcaccattgccaagacccagttttaaggcttttgtttatgacacaacaggccagatggtggtgtctctcactgtccaagtttactctgagtacacttcataggtatttgttcaataaatactgaaaaagattataacaatcaactaagcaagaactatgatttaataacagcagcaaatttaacatctattgagggattacttgcctgccaagcccagtgcaatatgctttgcatattttcccatttactctttagatagtggacatgaggtaagtactattattatacctattgtaaagatgaagtaaatgagcttagggaagttcattaacttgcctaaagtcgctcacacaactagaaagtgttggagctgaagttttcacaggctctcagattctagagcccactttcatgatctttatgctatattgccaaaacccactgggaaataaagatatatatcattaccagtactttgttaaataatacattttaaaaatagaaatgatcacaattttagaatttgggaaaatgaacaatgcctagtacacagcagctgttcaataatatctgttgagtgaatgaaagaataagcaaagaaatgtcactgatatttaataaatatacacaggttatatctcaacacaacaaatatttacccacagagcactctactgtacagcttatttctttcttcctacagatgactatgtaccactattttaatctgctgattatttgaaggtgagaactaaatgctcttaagtgagaaagatgatggatcaatctagaccaaatgactggggagttaccaaggagaggatggaattgtcaaatcttcaaatggcatgttactcaacatataaaatccttctgtaattgaagaagcaattaacaaacaccatttaacagttcaactttcttcagccctttggttactcattttggtagaggttctcattagcaacaaaatattaaagaaagaagcagctaagagagaaatagaaacatgagactggctatttgaaagaatgctgtaattgaaaaacaagaaatactcagcacctcaaattcataaagagataatcatcaagttatctcatgttttgacattgataacatattccaatgaatcaatttttaaaataattataacaccctaaaagaaaattaccctctagtagaatgccacaaagatactcctcgagaagagcaactccaagacacataattttcagattcactaaagttgaaatgaaggaaaaaatgttaagggcagccagagagaaaggtcgggttacccacaaagggaagcccatcagactaacagctgatccctcggcagaaactctacaaaccagaagagagtgggggccaatattcaacattcttaaagaattttcaacccagaatttcatatccagccaaactaagtttcataagtgaaggagaaataaaatcctttacagacaagcaaatgctgagagattttgtcaccaccaggcctagaagagctcctgaaggaagtgctaaacatggaaaggaacaaccagtaccaaccactgcaaaaacatgccaaattgtaaagaccatcgatgctaggaagagactgcatcaactaatgagcaaaataaccagctaacatcataatgacaggatcaaattcacacataacaatattaaccttaaatgtaaatgggctaaatgctccaattaaaagatgctaactggcaaattggataaagagtcaagacccaccactgtgctgtattcaggagacccatctcacgtgcagagacacacacaggctcaaaataaagggaggaaggaagatctaccaagcacatggaaaacaaaaaaaaggtggggttgcaatcctagtctctgataaaacagactttaaaccaacaaagatcaaaagagacaaagaaggccattacgtaatggtaaagggatcaattcaacaagaagagctaactatcctaaatatatatgcacccaatacaggagcacccagattcataaagcaagcccttagagacttacaaagagacttagactcccacacaataataaagagagactgtaacaccccactgtcaacatcggatagatcaacgagacagaaagttaacaaggttatccaggaattgaactcagctctgcaccaagtggacctaatagacatctacagaactctccaccacaaatcaacagaatatacattcttctcaacatcacattgcacttattccaaaattgaccatatagttggaagtaaagcactcctcagcaaatgttaaagaacagaaattacaacagtctgtctctcagaccacagtgcaatcaaactagaattcaggattaagaaactcactcaaaaccgctcaactacatggaaactgaacaacctgctcctgaatgactactgggtacataacgaaatgaaggcagaaataaagatgttctttgaaaccaatgagaacaaagacacaacataccagaatctctgggacatatttaaagcagtgtgtagagggaaatttatagcactaaattcccacaagagaaagcaggaaagatctaaaattgacaccctaacagcacaattaaaagaactagagaagcaagagcaaacgcattcaaaagctaacagaaggcaagaaataactaagatcagagcagaactgaaggagatagagacacaaaaaaacccttcaaaaaatcaatgaatccaggagctggtattttgaaaagatcaacaaaattgacggaccactagcaagactaataaagaagaaagggagaagaatcaaatagacgcaataaaaaatgataaaggtgatatcaccactgatcccacagaaatacaaactactatcagagaatactataaacacctctatgcaaataaactagaaaatctagaagaaatggatgaattcctggacacatacaccctcccaagactaaaccaggaagaagttgaatccctcaatagaccaataacaggctctgaaattgaggcaataattaatagcctaccaaccaaaaaaagtccaggaccagagggattcacagccgaattctaccagagatacaaaaaggagctggtaacattccttctgaaactattccaatcgatagaaaaagagggaatcctccctaactcattttataaggccagcattatcctgataccaaagcctggcagagacacaacaaaaaaagagaattttagaccaatatccctgatgaacattgatgcaaatatccttaataaaatactggcaaaccgaagccagcagcacatcaaaaagcttatccaccatgatcaagtgggcttcatccctgggatgcaaggctggttcaacatatgcaaatcaataaatgtaatccagcatataaacagaaccaaagacaaaagccacatgattctctcaatagatgcagaaaaggcgtttgacaaaattcaacaacccttcatgctaaaaactctcaataaactaggcattgatgggatgtatctcaaaataataagagctatttatgacaaacccacagccaatatcatactgaatgggcaaaagctagaagcattccctttgaaacctggcacaagacagggatgccctttctcaccactcctattcaacatagtattggaagttctggccagggcaatcaggcaggagaaagaaataaagggtattcaattaggaaaagaggaagtcaaattctccctgtttgcagatgacatgattgtatatttagaaaaccccatcgtctcagcccaaaatctccttaatctgataagcaacttcagcaaagtctcaggatacaaaatcaatgtgcaaaaatcacaagcattcctatacaccaataacagacaaacagccaaatccgaagtgaactccaattcacaattgcttcaaagagaataaaacacctaggaatccaacttacaagggatgtgaaggacctcttcaaggagaattacaaaccactgctcaatgaaataaaagaggacacaaacaaatggaagaacattccatgctcatagataggaagaatcaatatcatgaaaatggccacactgcccaaggtaatttatagattcagtgccatccccatcaagctaccaatgactttcttcacagaattggaaaaaaactactttaaagtttatgtggaaccaaaaaagagcccgcattgccaagacaatcctaagccaaaagaacaaagctggaggcatcacgctgcctgacttcaaactatactacaaggctacagtaaccaaaacagcatggtactggtaccaaaacagagatatagactaatggaacagaatagagccctcagaaataatactacacatcttcaaccatctgatctttgacaaacctgacaacaataagaaatggggaaaggattccctatttaataaattgtgctggaaatactggctagccacatgtagaaagctgaaactggatctcttccgtacaccttatacaaaaattaattcaagatggattaaaaacttaaatgttagacctaaaaccataaaaaccctacaagaaaacctaggcaataccattcaggacataggcacaggcaaggacttcatgactaaaacaccaaaagcaatggcaacaaaagccaaaattgacaaatgagatctaattaaactaaagagcttctgcacagcagaagaaactaccattggagtgaacaggcaacctacagaatgggagaaaatttttataatctacccatctgagaaagagctaatacacagaatctacaaataacttaaacaaatttacaagaaaaaatcaaacaaccacatcaaaaagtgggcaaaggatatgaacagacacttctcaaaagaagacatttatgcagccaacagacacatgaaaaaatgctcatcatcacttggccatcagagaaatgcaaatcaaaaccacaatgagatatcatctcacaccagttaaaatggcaatcattaaaaagtaaggaaacaacaggtgctagagaggatgtggagaaataggaacagttttacactgttggtgggactgtaaactagttcaaccattgtggaagacagtgtggcgattcctcaaggatcttgaactagaaatactatttgacccagccatcccattactgggtatatacccaaaggattataaatcatgctgctataagacacatgcacatgtatgtttattgcagcactattcacaatagcaaagacttggaaccaacccaaatgtccatcaatgatagactggattaagaaaatgtggcacatatacaccatggaatactatgcagccataaaaaatgatgagttcatgtcctttgtagggacatggatgaagctggaaaccatcattctgagcaaactattgcaaggacagaaaaccaaacactgcatgttctcaatcataggtgggaattgaacaatgagaacacttggacacagggtggggaacaccacacaccggggtctgtcatggagtggggggaggggggagggatagcattagtagatatacgtaatgtaaatgacaagttaacgggtgcagcacaccaacatggcacatgtatacatatgtaacgaaccttcacgttgtgctcacgtaccctagaacttaaagtataataaaaaaaaaaatgggaaaagagacagagccaaactattttaagatgatctagccatgatgtgcaaaaaataagcttaataatataataatgaaagttgtatgtaatactttcctttcattcaataaatattattttatataggaagttcattttataatacatgtcaagtcataggggtgagataggaaagaggcacatttatggccttcattattaagccatatgaggggtaagtttagaaacaaaacaacctgggcaaaatataaattggctataagtaggtcatagatatttacgtttcttgttaaaatatatgataggaagaattcataggtttcatcctctggctttagactgtgatattacctattcatgtgggaaaagttcttcttaatgtataggaaaaaaggttctgatacgtagaatatcctttgttccatttttgaattgatagtgcaattagttaagaaataagacataggaagacttgagaacctaggtattttacagagttttaaagagagagctcttggtcttcttgggagggtcttaaggatccgctttttattgttgtattctttgttcatgtaatttgtgctgcttgccttggtttgaccatggttctatagcaaagcagaattccaaggggattgggtgaaagaagaactcttaagttatggctggttttcccagaaccagtttcttaaatagcctctaaaatcttcatctttttccaaataaacattattagtaatctctttaagagtaaaccccatcacctcatattactctcacgtactgagcttttaatatacatcaagaagattaagcacacacctcaggtattaaaatgtgtttcctctgcaatctcattttatatcaaacatcagtatggttatctcatgttgtagagtattgctgaactagattctatgttggctgagctctaatttaagtttagatacagctcaagccctacatagaagcacatttaaatgcatcgctttagcttgtttctgtagcatttaaaggttctggcatcatggaaatgattttggaggtattctgagtgcctctgttgattttaccagacttgtgaccttaggcaaatggcttaatttctcttcctcacttttcattttgcaatgagaacatgaatattaaccatttacataattataaccaaagttatgaggctaaagtatgagaagagtgacagggacagacaagtattcaaataagaagttgtttgctaaggtctatttaatgtattatagtatgagcaagaaaagttttcagatttgtgcacattaattataatattaaagctgacagggttgagaatatttgctaatttaaaaattataaagttgttcatcagaatgatgtaaatatactctagaagaccctgaaattgtatatgttttcaagttttgaataaacaacataactgaaggaaaaaaatagtaaaaaatatataaataaaataaagaaagaaaattaccctctagtaattcaagtcccctttttcataagcggtgccagagtaaaataaaccaataaaacatgagagacttcactcaaatgtccagaatctttaccaaaaatagtcaacatgaaaagtctttatacctgcaatgttttccactgcttttctcagtattatttatagatctgagttatatattaaaagtggttattaaagctaagccaaaaagaaggaaggctgataaagttttaagcagttttgtttcaagatcaaactggacagatctgcaaagaaaatcacaactatttgcgaattttagtgaaacaaatggaacttttacagcaaattcaatgtttacccttaaagataactgaacttaatgactcaaaactttaattatgaggtagttacaaatgtatgtggttccattttgataaagacctgggagaggatccaaggagcaaagttatttgcaaaaaaagttaggcaagatttgatggagtgtacttgttgaatacgaatgactgaaaagtattttttaatctacttccttgtgatgataataaggttctgtttaacattagatctgtcagtgagcagataaaggaaagaatctaaataagattcactttcaataagctcggagtagtctatggattaggatttatacctccattctactgaatatgtggatcagttctaagagagaaaatattatgaaaataagacatcaaaggttgatgccttaagggctaaagaaatacaggcaactcagaaaatgaatagcatttgaatttatactcggggaggaaaaaaaggacttcaaagaacagtcatatttattcactagattaaggcagacatttttccagtacaaagtctgtgacacaattcttcacccctgtccaatcccagcctccattttcaaatatcttggccatgcagcagtttcttttcaaacgaaatgaaacaaaacaaaactttattattttattgaaattctagtcacttccttcacaaactcccaataactcagtgtatttattcctctataaagtaagtgcagatcagaagaatgagttatacaccaggttggccgtcttcgctgggaagatggttaggtcagcttgaagtgaagtcagtagttgtggtttactctatgtctatgtctggcactgcgcagtgagcctctgttcttaaaggaatcttattttaatcttcttgggaaggcaagacattcatacttgaaacaactattaaatgatgcaaaacaacttacaattaaatgtaaattacacggtggagacatcaaatgctacaggaattaaaagaaatgaagaaaagatgtttcagctgttgtgtgggattacagcaatatgttgtaactgggtgggagactattaagagactcctgatagggaatgtgcatccagtacatcttcttcttgaccacattcagagtcccgcatagagatttctggaagagcgtgggagctgcttcagaacaaagccaatgtcttgagaaggaccatggatctacggtgatgtttgaagagcaagattaaaatgtatactgtatccctatgaccatttgctcctacaaatcacaggttattaattgattataactagtaacacacataacagtctacttctaaaggacttttaccaaacattactattaataacttttgctgaaggatgttcattaattcacacagtaactactcataggtcagctctccaccaaggaggcacagagaggtgctcataatcatgaaactttcaaattgtattaaagtcgggaccccccaggaatacccatctgacttacacttatatctaatcaaggtcagccactttgaaatctccatggtctctaaccttttaggatcttttctttcaaaatttaatgagcagctcaaatccatatcttttatttatcatagaacccaaacatccgggcttcaataatgcttctgcatttttgaaaaaaaaaaaatatcgagtcaaggagcatttattccagtgtgagtcttctgccaactgctaccctactgacccacccctcatttacaagggccccttctttactcttagctcctcacagtatattacaattgcttccccaaggcaggaactgcaccttttattgccataatattataccaaatgtcatctctgtgcataacacgttatgtatgcaacatgtttgttgaaatagccgaattgtttcactagttatctgatagtttaactactcaggccaatggtcaagtcactcttgtctgggccctagcaactctctgcatgatgcatattggaccttgaagtcctttcaagatgaactacacagactggtgacatattcaaaaatggtgtgtatttgattttattctattttttttctttttgagacatggtctgtgtcgtccaggctgaagtgcagtggtacaaacacagttcgctgcagccttgacctcctgggctcaagtgatcctcctgcctcagccccccaagtagctgggactacagacatgagccaccacacctggctaattttttgttgttgtattttttgtagagatggggtttcaccacgttgctcaggctggtctcaaactcctgagctcaagtgatccacctgcctcagcctcccaaagtgctgagattacaggcatgagacactgctcttggctgatttaattattgttaaactgatttcaactcatattatctggctcaaagtcattcaactcgacatgtggaaatattatgttttgaatcattatgtgctaatacctttagttattgtcttctttttaaaatgagaaaataaaatatgatttacacatatataggaaagaagagtaagttaactttttaaaaagtcaacttttgttactatgaacttgctggtttacatgtattatgcattccatcctcccaacaaccctagaaggtaggggcatctgggaaatgaaaggctgaaagtaaataatatgagattatatagccaagaatggtaaagccaggattcaactcaggccatttttccagagtcttagtgtataactgccaatccctacttcattcataatttcatttaataaatgtccatcaaatgactactataattgggcacttattctagggatacatcaatgactacacatcctggcccacatggagcttacattctattgaagggagacagacaataagcaatatcttaatatacattatacagcatgaaaaaaagtgacaagtgctatgaaattcattgatgtggaaagagagggtaagaatggcgctagtggagaggaatgcatttgcaatggtaaataggatgttcagggaaggccttgttggaaaagtaagtacatctaagcaatgatctgagttatactttaacacatttatttgatgagaaaccagtaaaagttgagaatacaatagagcaaaaaactgcaggaaaatactgaagctcttggtttttataaggtatttattccagtctcatactttagtcaaacttgcacatgttttgtcacttgtattatttttttaagttccttgaccggaataactgtgcttcacacagctttaaatccttccatagtgcttagaagagtggctgtcacaacagaaagtatctgttgaaggaatgaaggactaatggaaagagatacacatatgagaagtaaaaaacagaaaaaagaccacatcaatagttacaatcactggtaagaaaaccccaaaatagatctagtctagaaaataaattcaaggaagagtactttctgatcatggtaatgaaactgagagaagatatttgggaatagaaagagagtagttttgctaatcttgaggatgagaaagttgaataagaaagccttcctgatggggagtaatttggggtgaatctaaattaaaggccacactgagcagactgaataaagttattcatccattgaatcagcatttactgtgagccacctaagtactaggcactagaggaaaattcattaatagatagtccctgaatttatgtgcttatattctacaagagacagctattaaataaaaaagttacataatcaattaattataattgtgttaaatgctataaaagaggcacatagagggccaaaggggcttaatctttctgggggtaccaggaaggagaacctgagacctgaagggcaagtgtgtgggggtgggagtggaataacaggaactttctatgttctatgtactacaggtattcaatgaatatctatcaagaattgttatgttcctgcactacatacaccaacacttaccatctcatttactcttcaaagcaaaccaatgaacaaagtttcactatgctcatttaacagaagagaaaattgaggctcagagagataaaatatcttgaccaaggtcacacaggttgtgagccaagattccagtccaaacctgttcaggattttcccatatcagtcaagtgtcaggcaacctgttaccaagatctctgctattctgatgagttgttattatgtacttgctaagaaacaacagcctaggtaggggctcagagttgattcaggtcagggcaggttgatatcagctagaataaccaatgaaaagccctgttgaattgtcccaatggatctagcccttggtcctacttgatgtaacaaactttcctgcctttatttactgattttatgcagtggacaaatactgaagctctatagacatcagtttcagcattgtgaacatgaaaatgaattatacatgctcctctctcaagcagtttagtctagtgaagattcagacccataaaataaatggagtttaatatggcaaatgttacaaaaatattacaaaaacagtatagaaagcattcatcccactataagaggctcctaattttgcctgaagtcttctaaaagaaactggactttggcttggaggttaaatggagccacaggatattaagcagagggatggagaaaagcattctctttagggacaagataaagtctgccatgtttttcaaacagcaaaatgttggttggctgagatgtatctgagtgtgttgaaggcgagggaaatggccctgttcccacttaagcagatcacatagtaatcatcttgaccccggactttctacattgcatggatatttgagaagttgactatgttgtggtttactttctggcatgagcgctttaaaactattacccaacatgaagggtcaagcagaaggaaagagatctgaagcaccaccacatacacccacattcaatcctattacagcaaactttacctgtaaactgacttgtttaaaaacattagaacactaaatgtaaaaagaatgacagcccacacatagtgcttagagatattttttctatttatttatttatttgaggttgaaagatagcaagaacatgaagaaatggaatttgcgtgacagtcccaaagcaaatctattcaaaagaaaaccataattacatatgcagctctcttgacagggatgacagcagtgaatcaacattctgcgctgaagacctaagtcaatatgcatttgattcaaaaaactaccttcattagcacagactatcattagtgatcacagatctatataaggctgaaaaacctaatctctgtgtctctgaaaactgcaaaaccaccttagcagttgcctaatttccctgagagtggaggtttcacttggccattgggctcaagaggccttaaagtgggcaattagcttgctggattatgcagtgtactttgtacctcttcattacattttccaccaggcttgagtcgaacagaagagcttacaatgtcaatgactttgaccatttgagattttgaagcagaatttcttaaccttttcatttctactgtttctcaattgatctacagctggggaaatgtaattctctcataattctgttaaaaaattatattaatagttccatggaacacacagaagcaggtatgttaaattatcaaattgaatttgagaggggagaaataagaatcagaaattatgtaaattaacaatttaacatactcaatgtggcaataaattatagcttcatagctggtggttataagtacgtcaacaattaaaagaaaaataataaaataaaaagagttagctctctggccacatcttccaaaattatataaaatagaatcatgacttattggatccccaaatcatttttaaattatagaatcagcttttcctgtgggggtcttctattaaaaagatggtattaagactgcaggaaattaagaatgcaggctttggagctagaaatgtctggttcaaacacaagcagacctgagtgtccaagaagtggtagctatatataattatgatggtggtggaggtaatggtgactgcagtgacctaaacaaaaaagaggaagatagaaatgatgatttggtgatcaaagatcaatggaacctttgtttatggacactgacttttgtcatttttctgataagtacttaagaaccaataatataaaatagggactattttacacctctttttcaacctgtagcaaaaaggtatttattttttcaaaatcttatcaaggtcagattgatgccaattaagtatcagtatatccctcatttcagtcaccatctactagttagatccaatttagatagtctacctcctaagagaatcttaatagcttcatttgcacaggaatgatagactattgatcagacagcctcaggcaggatccctttagtttgagtagatatatttaatctaatagtgcattgaaaatctaatagctggtctcctgggatccctggtcacaaattttaataccctgcacaatgaaattgcataaccattactgaactctatcctgttgccaactaggaatatctagaaaaccaataaaaggaagaacaaaacattcagaactgcagggctgtgtgattacagtctctattgtttctggtttaaagtgaaatcaattaattgcaaacacaattaaagtaactttgcagtagttggctaaatagaaaaacattttgtggtattattattttaccaacaacccaactttggcctatcatacctatgacacttttattttccttctataaatcatgccacaaaggttaaaaaattaaataacgacataggccttttattacaatcaaaatgggtaagaatgtgactttgcagagattaaataaaacagctatctcttcatgattcacatttattgaataccaaaaataatatgggagaaaaaaatcacgtagatttcacacctaataaatgaacaaagaaggagaataagtgtatagatatcttatataaatgtataggcatatttacttatctatttacatgtatttacatgctagatttccccaccaatgccatggacagaacctcaatccccttattacttccaaaatttacactgcctatccccaaacctcaccttctttggtcttatttatcaattaccaatatcaactcagtaaatgactggtccccttctccagttgcattcagatcacatgccaatcatatccactaaacatttatgaaattagcattctcctctcaatcccgtagaatcacaaagctagctcaagcctatgtgatgttttgcccaagccacagcaggagccaccttttacattcccagccttcaatcttgccacttacatatttattctccattcagcccctagaatctgatcttgtcacataattgcttggaatgcttcatggtttgaggatgaacccaaagtccttaacctggctcacaaggtccccagaacctaaaccttatttatctccaggctcatgtcttgtcactgaactactaaatcatcccttcatcacaaataccatgggattccttgcatcagtgtctctgttcctgctattcctctctccctgaaatgctcttcctattcctctctccaccctacattcattctttaagactcagtttaggtcacacttttcaccccagaaaaggttaggttctgctttttgccactcccataaaatcttctgcatagtgctaatcacggcactcactacacattttccctgataatctacgtaaatatttgcttcccctgctccaatttgaactactttaatctaaattccctgagaaaaggttattatttgtattatttatgttagtgtcttcagtatacctagaacatagtactgtagatacccatacaggttttgttaaatgagtgaatgagtgagtgagtgaatgaatgcttttctctagaacaattaatactgaaaagcaaatgtaagcacaatggagaaaatgccattccttagaattcaagaatgagtgtgagggataagcccaaggagtttcacaattatggaaagtcacactcagacagtgagaatagaagtgctggttgtggaaggtgaagactccaagaggagcaacacagaggtgaggagatggtaccagcaagacaagaaggctgtgtggtgcatagttgatgtgaatcttcttcacaacttctcaaagctttagtacagttcacacatgctatgtgttcttggatcccttgtgaaaaacagctcaattcctctacagctttgcatccagacctgaggcccagcagaaggtaaaaacatataagatggacacagagttctggaggcagagagtggcataaaggtgtcaggtgtggcactaacatagaggtcatggcaaaagttaatcacatttccaagggccaagaaagcactggtcaatagaaatatgacagaaaagaatgaagagggaagctaggtgaaagaggttttcatacatcaacagcaacatcacctggaaacaatttttgattagttaggcacttactaattattccctgcttttctttttttgagatgaagtctcactctgtcgcccaggctggagtgcaatggcacaatctgggctcactgcaagctccccctcccaggttcacgtcattctcctgcctcagcctctcaagcagctgggactacaggtgcccaccaccacacccggctaattttttgtattttttagtagagacggggtttcacaccatattagccaggatggtctcgatctcctgaccttgtgatctgcctgcctcggcctcccaaagtgctgggattacaggtgtgagccactgcgcctggccaattattccctacttttaaaataaattataatcgtgctgagagaataaaaaaattaaaggaaagagttcagtgagccgtgatcatgcaactgcactccagcctgctcaacagacaacaaacaaacaaagttatcattcaaaatgtttcccatggccagatgcagtagctcctacctctaatacctgtaatgcccgcactttgggaggccaaggcaggaagatggcttgagtccaggaatttgtgaccagcctgggcaacatggcgaaacctcatctctacaaaaaatacaaaaattagctgggtgttgtggcacatgcctgtaattccagctacttgagaggctgaggtgggaggatcacctgagccaggagaggtcaaggttgcagtgagccatgatggtgccactgcactccagcctgggcaacagagtgagaccctgtctcaaaaaaaaaaaaaaaaaaaaaaattagaccaaaaaacaaaaacccaaaaagccaaaatgcatccaagtatcataagtgaaaaagtgagcttcttagcagccaatatgcaaagggaacataatctcttacacagtttggaattactcagaaaacgtggaactgtcttcaatcctaaagcgtcacatagaaatgttccctgagtctcactgggacaacacactgagcaatagctttaccagaatgttttgtgaatatggtatgatatcaagagtaataaagttattttggaaaaaaataactttagaataatcacttaaaagtctgctgtttttgaccataattgcacatggatatattgccttatataaactacaaagaattgtctatttcacatcacattttacaacttacattgcaaacctcacttcagccttgaggtacaactatcaataaaagaaacaggtcttatttttaaaactttttattattcatatccttggtgactttcagacaataattaacatgtggttagtatcaccttaatggaggaagtaccttatacttcaaacaacccttaccaaaagaacagataatacatatgtattgatacagcattacaaattgatgataattcaaaaaggcaccatgtagcttgtacttgagaaggaattttccctttgcatattgaagggggttctggtggtgttttctttgtccccagccgacttcacaatgaaatgtttctactttgcaccctttgggttcagttgttcaaccagttacaattagttagattagtaactggttgaacaactgtaatcaaagagcacagattgacttgttgtggtctactagagagagatttgctagtggtgttcagcagggctctgtctgtcctcttcaatgtgtgcatgaatgacttgaagcaacatacatacattcaagaaaaattcattaaacattgaatcatcatctaatatttgcctgctattatgacaggtcctgagggaaccaagaaaatgtcagttacatggctctgatgcaaagctgggaagaaggagaaggagtcagaggtagaggcagagagagtaaaagaaagagggagaaagtgagaaagtgagacagagaaagagagggaggccatgttacacaacaggaaatgtaacacatgacctccagctcgaaaaatttgaataaaaagatatttcaaggagtgcgagggaggtaacccttacaattattagaatgaacatttactcattgtcaacactatggagcacatatttgggaattcacctttatttatgccacacaatattatgtaggtgacaagctaacccgtcgtatttaacaatataaacaaaaacacaaatatcctactttattaaactgaaagcagaggactctcatctccccaaagcccaggccattccctgatattagtaaggatactaggtgaaactccttctttcaacatttattgtaattagtgaaaacatgcttaatgggacaccatcatctacaatgatgacaccatatctcaaatcactaatctttctgccatggacagatttctgtatcaggggacacctttgtcattttgtcatccaaattttgaggattctttttcaattctccagcattgactgagaatttaaatggtgccagcattgtgctggaaactggataaaaactgagataacacacttgagttcctactctcagagaatccacttattggattgctttgctataattcctgaatccagtgagattaactggtattttctgttgttcaaaaaactacttttcccctttttgtacagatcagcaataaacatttacatcgagattgtgtggtgtccatgaacaaggcattcagtagggtccaagtctagacttgaatggcgtctctcacatttttgactaagagacaatgtagacataaaagtatcataatccaacttacatacaaaatggaaaaaatggaaccagaacaccttaaaatgtttcctttgaaatatgtgtgtgtttccatcaggtttattttagttctctaaaactctgtaatactgaatactccaactaccaatattagtcaaagctgtttaaaaccagccttcccttatttacaaaaggcagattttacaagacaactatcagggataaacacaaaaagaaatgaaaactgttccatgtctagcaattcgccagagtaaactggctgtatattgaacacagctgtttctgtgagggatttttctttttttggaatttaatattgactgtgctcttgtggcaagaatatagtaaatgaaagattgttccaggcctgagaagaagagaggccagaaacaattgttcccctaggtcctccccttccttaataaccaaactgttgtctggagcctccttgagttaaaagcctaccatttttcatgtcaattacacacaaacaggacttttcttgtcaccttccctaaactgaggaagacacaaacccagcaggaaggcaattgtaaagataaatttaaaagtaagaaggcaagcctgaaatgcaaacataggaaagagcctcttattccctacacttctcacttttcatggaccattgaaggctgtttcttaccaaattgaattctttgaaaagagaaaccatgacaattttccccaggctacggtaaatatattttcttgcacatttagtttttgtttcataacaatcctaataaaattagatgcttttagcaccttacttaaattaagaagacctttcctgctaatgtgcccagaacctatctgggttactaatattaatagttccattttatcatgtacttaactttgtgccaggaattgtacacagcaccctatacatgttatggtatttattcttcccaatagtttgagggaatcatgcttgacatagtaatccattgatcacttcttactttgatctctacttatcctcttgtaggatcaactatgcaaagtggtggattatagcacaatgttaaagggcagtgctctggagttagatggtctgtatttgaatcctagctgcaggaagttggggaaagtacaaaatgaagatagtagtgctaccaatctcaaaatataaattctggagattaaattaggtttaatatgattgtttggtccatctctagactagtaccttgaccactagtactctttcagagatttttttatgttttcaagaatgacaaaaacgaaattctatacacaccctgatatccccaaagacactagtgccctggggattggccatgtgggttactaggttccatttatttggttatggaggatgttcttcacccaagttaatcctttcacaaaagctcatttttgttctttttcctgcagcttccctcagaagaagctgtggccagtgaggatttcagggtcgcttgtccccaggtgatatgggagtttcagctcaggaagtgactaggttagatgtgggggcaaatcaagaccttttcagccactagcttaaggctaacccaccacagacctaccttcttgaacaacactgggaatttgggtaattaaatgctaggatatcagacatgatgtgattaaatcgaagggctgaaacaaatctgacattctgtgctcaaattataaggttagcaaataagaaaactagaaatatctctcttctaggcaagaatgagaacataagtctacccaaatgtgctctacagaggtttcaggtttagcatcttgcttaaggatgatgcttcatggtttagagagaaatgaattctagaatgtatcctttgcttataggacataacccatatttatagagatattttcaatatggtggagctagtggtagggtagaaagaacataaaattgactataaggaaatataaatccttttccgagctccttctccttatgcacacatatatacatatttgataaaataatggccctgaaaaaatattagagtggttttcttaaaacctaaagaaaatggtatccacatcagtgatgctcaattgctttttattatggacaatgaaaccaaattagattaatcataaggcaaaatttcaaatgaaaccagtaatacagacatagtgtctgtaaggttttatagcagaacatcagcaagatagcagaaacttaatgcatgaagtaacctctcaaccttgttaaagaatttcttttatatttcttgataaaatagtttttgttacagttagtaacattattttaaaaactgtacgtcttcttagctgtacacagaagtgagacatcactaaccagagatttcaatataaatatcttcaagtaaaaatgacatagtacatgttcagagatagcaaatggaaaaacagtggattgatttttataactcttcgtgaataaattctttaatgcaacaaacatttattgaattactgtttttcttggcactgaggggaataaaaaatgagaaaatacagtctctgcctttatggagctctcagtcttgtggaaactcatccacaagatggtcacatgcatatgttggtctagtcccaggccttaacaaactatggccctcaggccacatctagcccatagcctgtttttgaaataagattttttttaggtttttattttttttgtttttggttctggggtacatgcacgggatgcacaggtttgttacataggtagatgtgtgccacagtggttgctgaacctatcaacccatcacctaggtattaagaccagcatgcattagctacttttcctaatactttccctcactaaaccccactccctgacaggccccagtgtgtgttgttcccctccctgtgtccatgtgatctcattgttcagctcccatttataagtgagaacattcatccacgtccctgcaaaggacattatctcattcctttttatggctgcatggtatcccatggtgtgtatgtaccacattttcttcaaccagtctatcattgatgggcatttgggttgattccatgccttgctattgtgaatagtgctgtaatgaacatacctgtgtatgtatctttgtaacagaatgatttatattcctttgagtatatactcagtaatgtgattgttgggtcaaatcctatttctggttctagatctttgaggaatcgccatacagtcttccataatggttgaactaatttacattcccaccagcagtgtaaaagcgttcctacttctccacaacctcaccagcatctgttgtttcttgactatttaataatggccattctgactggtgtgagatggtatctcattgtggttttgatttgcatttctcaaatgatcagtgatgttgagcttttttttcatgtttgttggctgcatgaatgtcttcttttgagaagtgtctgttcatgtcctctcaaacaaaccccacagctagtagaagacaagatccagaacagaactgaaggagatagacatgaaaagccctttgaaaaatcaaggaatacaggagctgattttttgaaaaaattaatagatagactactagctagactaataaggaagaaagagagaagaatcaaacagacataataaaaaatgatcttccatgtaagacgcttatcacaatgtctaagggacagaaagctgggagtctatggagcttatgagaataggctttatgatagttgtggctccttggtaacaaaagcttgccagtcaacaaaattcagtccaaaatctgctttcattactacattagacatgatggcttagttgtgggagaggacacctatgtaccttatcctctttcaattaatgtagactatgatattcaccaaaaagactctgataaccatgaagggtcaaattagctatgtcaattcatgatgattaatttgaacataaattattaattttgataaagaggtattacctaagctttaattaatgaacgttccacttctacttaggacgtgaaagtcaccctgagtttatgtcaatagcattggctgaaaagtcttaatttctcatctggctttttttttttttttaatcgaggatatcccttcctccaacccaaatatattttcagcaacactcatgccaacccttatctgatgttgagaagctgtgaatttgatagcagaatcataacattttagacttaaaaagtgctttaaagatcatctacttcttctacccactcaactaatagttttatacttgaggaaacagagttgcatggaagtaaaggaactcgactaaaatgatcaagctagagactgaaccaggatcagagccctttcccctgcagccccgggaaaaagaattcatgttgaggaaataaggaaaagtgtttaatactttcagctaagcataaaattcctaagaactcttctctataaacagaaaatctaaactctccaaaagaatcgcacccccttagctgtaacaaagtctctgcagttatttcacagctgaaagccaactgacactgattcctgggtggtttcactaaaatagaattttctgaaatgcaaactcacctcccaaggaagaatatgaatttgaaagaggaaaggtgttagtggcgccaacaacttgctaccctgctgagaagcttccagatagccagaaacacagcagggagtagcaagaaacagaagttacagatgaagctgctctttagtcacaaacttgtttctgacagctcttgttgaaaaacctggggacagctgaacagaaacgttagtccagaggcagcctcagggctcaagtgctcaaggatctcatctcagtgtaaatattccaacttcctctcatccttctcctactgaggggaggaggagaccaaagggagtagacgatttgaaggcagttgctaaatgagaatcgctgggtggtatgcagaaaatagcatggttagcttagatcctacaaccagttttcaaaaataaaggaagtaataaccattagcataatgagaatacaaatcccaagtctccattactttagacagaactctgcaggagaccacctaaggaaaatctgggggaaaagaagtttccaatcaattgcagcagatttaactgattcccttctgtgggcacagcatggtattgagagctttggggattattagggaaagagaggacatgctttctttccttgagagattctgattctgggtgagacatggtgactatgtgcatctgaatatgctacaaggatataaacaattatacaacgaaccagaactatgctggctcagtgcccagggaagtcggaagaattcaagtcaggaccttgagtcagggatgaaacaggaatggttttatgaagaagtcaatttttcagctgagttttatacatgaaaggccatctcgtttagccgaaagtacaggaagggcctgtacttagcatgagaggcaggaaagcaagaaagcctttgtataaaatatggtgaaagaatcaacaaaagcttctgaagcctacatttatatacagaacttattctttatccaaaatgtaatgtggggattcatgaagatggcagaactccagtattctgcacattaataatgcaatgagcatgtctatggcactctaatcccttaaaatttcatttgtaaaataattatccttgttctcataacagggaaaataaaatcctaggctacagtaacaaaatatattatttaacttaatgtcaatgttaaaaataaaatagtaagaaacagtctgatattatatttcacagttatcaggattgtgattgtaaatcctataaatgtcatatcctgattaaccttttaggagaaaaatactccattggtgtagttctaacactgtttttgagatgaagcaaaatttctcatcaatatttctattctgactgtttggatatttaaaagtcatataacctaatttcaattatgttataaagaatagggttaaccaatagctaccacctgaggagcactgactgaaccaggcatacggtaggaattttacatggttttatatgtgatactaacaatagcctaataaggtaccataactccatgtacattttacagggaaaggaagatgtggaaagttgaatgaatgtgcccttgttcacaatgcaggcactccaaaccacagcatattaaccaatttgacaatcacctcttagagggttctctattgtcttctctaataggacctgcagaggaaaagatacaaattccattctgctttacctctgcagtaagtatggaaatgtatctcacattgtttcttattcatgtcttttcaatctgcctatgtcttcagagaattcttatcactacattgggaaaattttctgcaagctgacatatcacacttccagggaatttttgttgatataagaccattattttgtcccaagagttctcataattgcccttagtataatcccttaagtctctttccactgcagtatttatcttcttttaaaaataatagttaaataaaaattaacaatgtaaattagctaaaaaaattaaaaaaaataatatatccattcatttatctagccaggctgtaaatactcctctgttgcataatctttcaattctttcatcatactttcttctgctctcttcactcccttcaaattgtctgcatattttttatccactaggattgagtttctgtggttgaggctctgcctaaaagctagttgggaatcacaatcaaaatggattgttcatcatttactacaacctaactataacttcctagtttttgtctaatacaagatctgctctttatgccttcatcatttccaatgccaaattattccagcgatttttaattggtagcatattattaatacactatgcatcttcttttgtatattatgatatattacttcttgttgacatctcaaccagaaaaaaatggttgaggaaaatgcttataaaggttatataatgttcagatcttattcattagcaactctcatgaaattttctttggtaaggaaagggaaacagcccaatgacatttgtgcttatttgtggattttacttatccattcactctttcattagctctcatatttgactacaatttcctttgccaattacattataaaaatcaagtacatttccttcaggccttttcaaagttttccccagtgagttttaatttgacttctgatgcatggacctgctttgacaatatttaaatagaatatttatacaaactgatgcttcttttctactcgttttagagtatataaactgatatcagaaggctaaaataacatcaaacaaagttatcctagagcagtccataagtaaagaattataatcttcagctccatctctctctaccatattcattacctttccatagtctcataatatttttctaaccttatggtctaaatgatctcgttctgtctgtctatccatttgtctgtctctttctctccctctgcaaatcagataactacattatacaaatataagaataaaggttaatattattcatatatatatatatatatatatatatatatatatatttaagttgttttattctaagttctttatgttactcattaaaaccccaccattgttaccagggatttataacagatttattagtccactgaatttacccaacattgctaccagggatttataacagagttattagtctactgaatctattctgccaaaaaatgtgctgatacagattctgcccaatgagcataaagctatttttaaaaatataataattataataatatatctataatgtatatacgctatagggttaatagggtaagtttaatttgcaaaacaccaaacacaaaattaatttcataattactgaaactagaaggcaaaggttctgagcaggggcccaagatttatgtttcaggcataataacattggtggacaaggttgtcacatttcagagatgtggttatcatatctcacatttaaagttacaattattataatgaaataaataaggttgacaactgtttaaagaatttttgagtgaatagtccagtataaatgttttactataacactggaatatttaaagttacttatctaagaatttaaatttcaactgctttggcatggatatcatcattctgaggttagaacttctgtgacataagcaactattttaggaatttgacagcattaaaacaaagttaaatagtactgttcaaactggatgcaagaactcacaggaaaaaaaacaataagtgaacatttgagaagataggcaactttgctagcaattaggaaaaaataattaaaacaatagtgacagacatacctcatctgacaggcaaaaattttaaaaatctgatttaaggaaaatgtatgcgctgcagtcaataggctgaggcagacatcaggtccagcatgactcagcaagtttggagtgcaggtgcacaattctgcacattatgtaactacaccacgtaaggcgcattaggtgatcacccacatgagcttgtaactggctcagagccactattgtctgtaaaaggtataactaccggactgacactgtacctatggtttgcacctacggctcacactcagacagtaaaggcacgttgaaactgtgcatgattcctctagtgtttttccagctacccaccactcacccactgactcccctcagacctcagttagaacctgacaattggcatcacgaacaggatcccaaggtgggcgagcctttggtccctgctgattctgggttggcaatgtggccacgacatgggttgtggtacctggtcacagctgtgctgcaagggtgaactctgttggaaacctggccagcagtagatgggtaccccacgagcacggagaaagcactgaagcagctggaagtgcagagcaccgagaaggaatgagcctttgacagcagagttggatgggcattttttctgtgctacaagaagtacactcccaatccctgagggatgcagtgcaggaaagggccttttgggcacaggcagggtgcctggaggcccagctacacagcttagaaaaagagttagaggctgccatgaatggggatctccaggtgcaggtggggtgcctgaaggcctggcatagggttggaaagggagttagaggctgttgtgaatgcaggcctgggtccgtcatctcagccagagacccctgcttggtctgggtctgcactgtaaaaaaggggaagatgccccacctgcagagcctccccatcatggaagaaaagggggccccaacaagtgacccactcacagatgtggatagatttgactttggccagggttgactgagagaaaatcgataagcagcccaatgaagtactcttaactttgtggagataactgtctcaagagcagcaattccaggaaatgcagaaggggaaggaggacattgctgtatgacctggtcccactcaggtgcttcaactcaaagactacttgctgcagccaggtggaaatgttgagctttttctgtttgattagggaactggctgaggtgcctggcctggggggacaccagacaaatagaggccacatgtgaaattagcaatccactggtcctccaccaacatacagcaagtgctggcactggtaaacaccagcgctgatatattctgggggtggatgttttacatggcctgacagccatcccatctattacagatttgatggaccgcttgatgatggaatttggacagtgccactatgtggtggacttgattaatgcattttcaattaacattgctctagagagccaggaacagttcgccttcacgggaaggtgacagtggactttcatagtgttgctgcagggatatatgcatagccccatcatatgtcatggtcttattgataatattatgttaacctctgattctcttgcagatttagaagcggcaatgctcctcttgcctagaattaagatagtgtggctgagactgacttcctggcagctaaataggctattcagcaggcacaagccctatgggtagttgaccaagggtgctcatttgagttggatgtgcatgtgaccacagatggttttggctggggcctgtggcagagcatggagtgcttgagaacaccagtaggcttttggtcccaactatggaaagaagctgagctccagtattcactgatagagaagcagttagtaactgcatatgctgcccttcgggctcatgagagcatggcaggacaggctacagttgtcgtgtagacgagttacctgatagcaggatggatgtgttcattgataacaaccccccggactgggacagtgcagacatccactttagcaaagtggggcacctacttgaagcaacagagtacgctgagtacaagtcccttagcagcagagttgcaagaggtcttgagaccagcagtcctaatgcaagataaggccatggggcctaaggacatggggcctgaagcacccctacatgctgagccttcaccatttaaggaagggcatccccccctatgcccgatggggcacggtacacagatgggtctagctggggtgctgctactgcctggactgctcacagtccagcctagtactgactccatatggtttcataccgggtatggacaaagtagtcaatgggctgaagtcagagcaatatgaatggtgatcaccaaagaggtgacacatatgataatctgcaccaatagctgtgtggtctatcgaggcttaaccttgtggttaggcacctggaaaatacagaagtggctagttggccactggcccatgtggggctaggccatgtggcaagacctatgggaggaaggatgacctcctatgaccaggatggaaacggatggtaacctgttgttgcatgccccaatgcccctaaaggtagggaaataaaaacctggcttaatgcataaagtaaattcgggtaacatcatcatggggtgtttgcccgtcataacctggagttgttgctccttgtattactgctgtggcctctgggtctggggttccaccctgtgggcatgtttctccatttaaaagactccttcagcctagggagtagaatttaaggcctatgtgtcagacctgtgtgtccagggcctttgtccccagagtgtacgtataaggcctgtgtcttagacctgtgtgtccaaggcctgtgtctcctttggcattgagggtggagtgtaaggaaaatggatgtgctgctctcaaaaataggccgaagcagacatccggtccagcatgactcagtgagtttggagcacaggctcacaactctgcacattatgtaaccacgccacgtgaggcacattaggtgatcacccatgtaagcttgtgcttggcttggagccactattgtctgtaaaaggtacaactacgctgctgacgctgtacatacatcttgcgctcatggctcatggccagagagagagtaaatccatgttgaaactgtctacagttcctcacgtgtttttccagctacccgccacttgcccaccaactccccttggacctcagttagaacctgacatctgacaaaatcaaatgttacaacaatgtgataaacaggtaaccctcatacaccgattgccagacagtaaactagtatagccattgtggagaggaattgagcatcgtatagggaagttggtaatcctcttactttaagatccagcaattcaacctctggtcacggacctcaaagaaactctccaaatgagaacaagcaaacatgacaagaatattcacagtagtactcattcattcatttatttattcatttcacaaatatccattgagttcactgctgtatttgcttgggatatctctgggactgaaacaattctccgtcttcattggtatgttccaggacactgcttttgggtactgaaaagtttaaaatcaccttaaccaccaatgaggcaacaaagtagtgtgtaatcatataatgaagccatgtaactcaaactgtgtgcctactaagcacacaccagaaactccaggaaatcacgacagctgtacactctaattttggacttgtttttgcatcagttttctgaaagattgtcatggatgcaagcatgttattattagtcattgataaaagagcacagaaagaggatgtgaggagagcccttttttccttagggataaaaccctttcatcttggctttcatgaaacccattaccaggcaaaactgatgcgaattcctgactagaagaaaatgttctcctgcctttattctctctcagatgactcccattaattgatcccaggagattttctcattttgctgccttccctgcatccagccttcatttaccatgaccatcaggcatctgcagggccttgacctggaaaagctgccaccattcctagtagaggatgaacataaattctcactctcagaaatgcaaatatttcccttgctgtggggatgcataacttcagagaaaagctaagcatatggagcaccccatgtaaattaccatctcatacaacaactcactgtaaccttatctttatttcttataaatactgtttgtaaagaatataaaaaattgaattccacatgcaagataaaggcacagccacaatttcagaatgacatctaatatttctgaagtaataaaataaatgtaaccctgtggaaaaataaaacatttaaataaaatagttacaaatgcaataggaaactaagaaaaattattaggatagatccaatgttacattaaactgaggacagctcttcactgtgctggcttcattacgatatttaagaaatctgacagttgcaataattagaaacatttaagtttccattccagctagcacagacaagcccttgacaaaacaataatagtggcaagagccaacaatagagcacttactgtaaaacagcagacattgtcctaaacactatacatatatgtactcattcagtcctccaacaaccctacttttataatccccattttgcagatgagggaattgaggcaaattgtcagttacctttgctaaatcagcacgtctcaacttcagtgtacataaaaatcttctgaatatgctgtaaaattgcaaatgctctagccattcccataacccactctgattcagtactgttggtttggtatagactgcccacaatctagtgttacaatctccattttcgagaggtctgaggattgggcttggaaaacactgctccaattacactattcccagtgatattcccatttatcttcaatgcctctctgatgtttgggtcattgtttccatgtttctgaagattccattttgtttcatttcagagtaagaatacttatttcgatccaatgaatttgattacctattctatgtccatctaaagtttaatcaaaacaaactatactgatatgtttacaccttaattatgtcagcttgaaccaaagacataagactgttgaagaaaactcatttctcttttcacaaggaacctctagtaagctggtgaacaccttccttaatttttaaaacactctaaataggaaaatctctggaatctctcctaaacagacatttgcttaagtaaggattacaactcttgaaggcatacatgaaaaattcagaagtttctgaagaatgcttggccatatcatcattcaaacgcacataaagtaattttatcagcacaattttctttcttcagggccctcataaaaggaagattctttgactcctttgcagagctataaaccaagagtaacatccatactgtaagaacagaggctgttagaaagatctcgagattgtgctcaactaaaaaaaattcattttcttattttcacagtgatgaagaatgattttatacaatgaaagaaacaagtcattgttttcttcatccatggcaatattctccctgtctttcaagaaagattgaaaatgtctttcagattgtagtaatttgaaaagttgtaaaagattgtaaaatagaggcatatttatcagatttgggggaataaattttttttgaaaaagttctcagatccttttgaaaggagtttaaattgaagtacaataaaggtacctgctctcttctgttacaactaaagccagccactcttagaattaaaaaaaaaaaaagcctcttgtttctggtttcatataaggagacataagtggcttcaatgctgaacaggaggtaacactaaaggggtgaacttttgagtcaggccatgtaccaaaatgaatttctaccccaaaacaatgggactattctaaacatgagccattggtatgctggtaaatatttatcagttggctctccaggagaaaaaaaaaggcctgatttgtgcagtatgtccatttccatggtgtaactactatcagcatgtcttatttcaagctaccaatgtgatggccctgaatgtggagttgggaagagatttgtagctgcacctcattatatagtatttccacgacacagatacgatggactacataacctcaagagcatggataatagtaaaatataatgaagtacttgggaactaatgagttttgagtattgattacctttgcatttcatataatttatttaattacgggtttatataatttaataatgcctgtgctttccaaccaggtctcaaaatcattgaatacgtaacagttagtactcctgagctggtactactacctggctccaggctaccattgcatgtatctcaccttaagcaaaccttccacaatactgatccacttttatacacatgcattaatgaatgaaattacaatattatttaagtagaagttttatcccatgaatacaagctaaggctttattaatacaactcaatatctacatattttatagcataacactatacatttcagtgttaagagatattttagagatcatctgatccaacccttcctaagactagccatgacaactattggggatgccatctttattcattctcctattccaaaattccaaaattaccactttatgcaaaaagccacattcaattcaaactctgctatttctcaagaacatccataatttcactcaactggtatttttcccataaaattctcccaaccagcatccaacataccaaatcagtggtattctcactatcttctgtaaatgctatgtttattctcccttctgaagctgtttcttccactctgtcacacattcattcatttgcattttcaaggtgtgtatgtttgtgtgtgttttaagagaatggtagactatttacacacttgttaaaatgctcactttttttaagagatgggatcttgctctgttgcccaggctggagtgcagtggcatgattgtggcccgctgcagccttaaaatgctgggttcaagcaatcctcccacctcagtctcctgagtagccaggtatgtgctatcatgccaggctaattatgtagagagagggtcttgctatgctgcccaggcctgtcttgaactcctggactcaagtgatcttcctgccttagcttcccaaagtgttggtattataggtatgagccaaagtgtctggccctaaaatgcccatttcaactacagaataagagtacctgagcaagagcatctagaaatctgctttgtaaacaaggacccctcaggtaagggtaagatttctaaagtttcaagatcaactgatttagtgagtggtaactaaatgctaaggtgagaataagagagcatgaaacacaagatcaagtggtttaatggatataaacctgtaaacagttacaactctgtgttttaagtacaacaacatagtggtgttcaagaccatcattaaagacaaggaacactgaccagtgaagggaaactccttcacaaaagaggggagggctaagccaagtgctgaagaaagttctcttttgctggttctcaggggtcaaggcccagagtggctgaaaatgaaattacatagagtctaaacaagggccttagtatgtttagacttctctaagatagaatttccattatttgcttgataagaatcacttgggttctatacaaatgtagatttccaagcactgtcctcttgtattagaggttctcatttagtaggatggagaagagctcagaaacccagcagttttaaccttaaagaaactgttataggagcaagggccacagagaagtcttactaaaatataggggagtaacactttcagatttatgttttaaactaatatttataagtcttgtctatttttctcagtttagatcgagtttagcacctagtgaatcttatctgattgttatagcccaaactgacctcttcattttatacatcattaaacttggagtttgaattatacttttacttatttcctgtgtattattatttctcttctattgtcaaccctgaggaatagaaagtttgtctctctgtattcttcgtaatgcctgatgcaggcataagaacacagacacaaagtaaaattggttctatgaattctcagtacgtagccctagtttttaggcatgttaatctggaatacaattttaaaagctaacatttaatgagtgcttatgtgctagggactactggaagtaatttacttatattatctcatttcattcaatcaacaatattgtgaggtagatgctagtattgtctccattttacatataggaaaattggggcttaatcattttccaaggtaggctgggtccagatcatatgccctttattaccaagctacactgcttctccctaccctgccccctaaaaatgctgtttaaacaatgaatagataaaagaaagcaacaatgagattataatcagtagcaataatttttgaaataattaggtcagagtcctgcataaaagatgctactataaactataaagcaatccaaattattctaaatattcccaggctgaaatctgcatctgccagctatgcatcattgactcctacctatgctcttgattaaaaatctcctctgtgtcttcacattcccaatgggagtcgcatatcaggagaggcgcatccatgggtgcagcaagagtgacaatacatcacagcctcgacatctgtgacaagcccagccttttgacagtctagtgagggggtgtgcatcttgaatattaccagatgtgtcacaatctttgttccccaaatacttactcccttttggataacaaaacagcagaagacactactcagaacaattaaaaaggtttgaatattcccataccctataattaatcttcattcaatcacaagcatttctgttcaatctattgcttgaaatgaaatgctaataaggcaagaaagcacaactttaggacaatgccaaaaatggccttcgtttctcgtcttttgacataaataagatgcttttgatcatattaatgagtgagaaatgtgcaagtctctaatacaagattcagttaaattacattcatccttggagatgaacaacctgaatttaaaaggacaatttaggctgaataaaaagtcaaagcacagtgcaactaaaagtttattctaacttaatttaaagtattctagaacctttgcaaatcttcattgtcacacattttcacccttttcctccagtagtttttttcccaacttctgccatttctttaattctttccatgttcctatgatagttatatttattctggatttcctatgtctttaaaaattgttttaggtgctggttattatctataagaaatctaaagtgagtagaatgatctgtctcaagacattaaatagaccttgttggggtttattaattatttcttatagagttacaaacagtttagagggcttataggtgaaacctatcataagaaacaatgttatatgttgaacatttaagctccttgtataccaggacattactaggaatttcacttgaatctaactgggctcagtatactcctatataccaaaagcctttattgttgaaggtgcatagtaggaattcagtatatatacatggaataaacgtgtttgccctttttctgttgttgaatgcttttggaaattcaaggaatgaatgtgaatgctttctgatttttttacaattgcttcattattatatagtcatggttcagccttctttataaactaataatcttactaaatgctttcaacactgatcaggatgtgactcacctctgtgtcaaatacagaaggtactgaagtcacatcaaaaccaaagcaattttcatccctcatattcaggtctagtggaatagaacaggaaaagagaatctgcatataccttcaatgttcttgggtgacagaataccttaaaaaaacaagtatacaaggcgtttcctaggacagtcaaatgatgaaatatgggcttcaatctcctgggtcctctagttttctcatgaccagtatgtgaatataggcaaattacctgaataactcaacatgttttcttacccatataagaaaaggagagtaaatacctcatagaatgtggtaaaactaaatgagacattacatgcaaagcatttaacacagagcctagaacagagtaaatgctcaagaaatacggactattgttatatttctgggatttggataatttttactaatgtggataaatacagatgaggcgatcctacaatgagaaaaacagaagttgtgatgtgtgagacttttcatttacatacaaacggatatggaaaatggattatggatgcaatgtccctgataggaatggcaagggcctatttgggcattatactttattcctgaatcatagaagaaatcctatcaccaaaatacccatatgggttttcacattaaaaaatatttaaacactttctttagagatgcattctgagacccacgtaaggagttgtccaaactaatattgaatgcatttgacatgacagctgggtttgaaaaagtgctttcagcaaaagcagaagccactggttaacttttctccttgtagttaattacattaaacaattttatcccaaaaagggaaagagagattaaaatccaggttatggagcattcattgaggttttcttttcttttctttttccttctctccttccctcaggtagcagaaaatcatgagcttaaaaagaagctgacctggcaatgtttcccagacttcttttattcttgacttggaaaaaggaaaaattgagggattgagggatggtgattttacttggtccttctaggacctatttgaagactcttctagagtcaggtgttggttgaggttcacagctaattaatcactggaaacctggagagaatagcctgaggtattacaataacctaggtatgaaggtttctacaccccaaatggccaaattgctggctacttctgggattatctggacacctgaatcctaaagaatatgaagtcccaggatcacttcctcaagatgtcaaattactctgatagagaaagataatttttatcttatttattttttcctttccaacctttattttaggtttagagggaacataagcagctttattacatgactaagttgcattttgtaggggtgtacagatcattttgtcacccaggtaatgggcatagcacatgataggtagttttttgagaaagatgattttcaagcaagactggaaacagaacaggtagcagttagaaaatacatgtttttgtttatttatacttaattatgcataaataaaagtgtaaattatgaagtcacgatgccagtaaatgcttttattggcttgtccacagatgtcctcccttctctaaccccctttctcccaaagtgggtgtgagtgcaccaccaggtggtgacataatgaaatgacacatagggcatataatgtcaggctgaggagaattttggaggttccaaggattgctggaaataactgcacaaacatggctctattactagagcttttgtgtacttgaggttttatttttgtttttgctgaagcccaatacaaatatataacaacattaaattgccatttatgactagaattttaaaacctaagtcaaacatactttcattgaacctggctctgcttttcatttattttgtcacacagggcaagttatgtaatatttttgaacctcacttcttcatccataaaattcaggataataatggctgccatgaaatagtttaattggaccttaagactgactatctctccaagattctttcctcttctccctccattccccaccatctccattgtctactttgttccttggctttacctttccttctggtttgcccgggggggataaatacccacttgtacatcacctcctcaggcagcgctgctcagcccatacctccgtgctcatgccaggactcatatagcctttagcctttgcattctccacactgtttagtgtcacttgtttccctgagttttgctcactgctgggcctgtagcactgggtccatatttctatgcatcttattaacctaggcattacacccaagatataaacacattgtagatattcagtgactttttgttgaatatttttaaagtataacaaaaagcctttgaaataccaagcaaaaaagagtacgtaaaagagcaagaggactttctgaaggagtatattcattgcccaaaaaaggagatctatcccttgagagagaactgtaaatctcttctactcagcttgcaaatacaactattaagatcaatggaatgcactgcatataaagttgatttatagccctggttctttgtaaatgttaatagtaaacctaatttgaaatgttatttaaaaagaagctaccatttcagtctaaagcatttactttaaatcattaaaaattactttgtgttccttctcattgggatctcttggacttaggaaacaatttgaaatcctaagggctttatttaattaaacaaactccataaacattaaagttagttgttttttttcatataaataacagataaggtccctaaaagattgattggaataaagaagacattgatttgaatcagtctctaaacaattatgtgactttggccaaattagtaaacttctgagtctcaatttccccatgaaatggttaagaccaccctaaggactgctatgagggttgaattattaatgcccacaccactgtgtctggcactgagaagggttagctctcttctttcatttcatccacacctactcttcaacatatacatttctctaaagtcaatgtgtttaattttttttaagttcaatgctaacaaatattaaatgcttcttttcccaacactataattttaacaaatgagtttcaggcatatttaaaaatgagtttcaggcattagatcatgtgaacataactaattatgtgaaacatttttgtccaacttctacataaatcatagcttcaaattatatggtcataagcctacaagatactcattgctatgcactgaattatgtccccttcaaaattcacttgtggaagccctaaccctttatgtaatagtattcggagatgggtcttttgggaggtgatgagatcatgagggtggggcctgcaatgatgggattggtgctcttataagaaaagacaccagagagcttgctctttctccaccatgtcagaaggcactgactgcaagccaggaagagggcccccaatagaacctaaacatgctggcaccctaatttcagaactttcagcctccagaattgtgagaaaattaatctgttgttgtgtaagttatccagattatagtattttgttgtagcagctggagctgactaaaaccctcatgtgccaacgtaatatcgttttagttataaatttaatattgatacaactttagctaaaggaataaaatctgtatgagaaacaatataacttttcaacagtatgaagatatagttcttcttattcataaacacacatatacacttgcatacatatatgtaaactatattttgaatatagaagatcaactatatagaagatcaactatatagccatctagtttaactcattgatcatttaattcaacagagttgagcgcctgctatgtgccaggcaatgcactaagcaccgatatacaaagataagggagatacattcttatcttaattgagcccacagcccaatagaggagaaagtcaaaacatacgatatataataaggtatgataaatgctccagattataactaacataatattaaaagttgttctcatactgtagaacggttcttccctaaaactgtatcaactccacctaaattaatccaacaatagcctcctgacatttttacttagagagactaatttagcaggcatctaaggcagaataaagtgtttacctcaacttttctatcaacaatgttagaagtggaaaatacaacataatttttgagtctcagctcctgtcaatttaaatgaaaatagacagttggttcagcatatgttgatttcttaaaatcagaaatagattttcccagcaatacgcctcagggaaaataaaatgtgtgggctggtttatccacgcattaaaagcaagcttccagctgatgtttgattacattcatgaagaaaaaaatattgtaatgagaacatccaattactctttccacaggagtaaaaatttctggtctgagaatttgtttcaaatcagtggttagaacataaacaaacaaataaaaaaggggaaataagtgagaatgagatcctcagaacagctactaaatttgagtaggcagagcatggtttctggagtccaaaagcctgtttaaagtcctgactctaatgtctactggtaaggtgctggtgggcaggtttcttaccctctgtgagcatgttcttttactcagcagtaacatggaaccaaataagacccattgatagagttgctcaaaagttcaagagaataatttgaattctctttctctcaatgcatgccatgtgtctgacctatgacaggctctcaatacttggtagacaataggaattattattattggaaggaagagaaataagaaggaacagcaacttgaaagactactattggcttcattgaaataggatctttgcattttgccttctttatctttgcatcttgtcttctttttactttctcttcacacacgtgacctaataataatagcatctgtagtaactgttgtgttatcatacagtagcacccagttttgtaggtcttattttacttaatttgtagtcagtaaacatattatccccatttgatagatgaggaaattgaggcttagacacgttaaatgtctttcccaggtcacacagtttggaagagatgacattaagacttgagctctgatctatcccgactctaaagttcatggtaatatgaacataatataaaagggaacatagtataatacaaaagaacataaaaataatacaacttatacaatgttaactttcaattcagccctccaatgtaatctgaaagatctttggtttgatttaaaaatcaagtcaaatctttgtatggcatttctcctgggaggctcaaacaagtaaacattctaccctgacgttgttctttccttttctctcctttcaagttattcaaatgctcagtaataagcagctttcaactgaatatggtggggcaaagccagctgctctttctccatgtggtagctcagatggacacctcactcttggtgttactgtgtagctgtactcccttaatagcctggccagctgtcttacataaacaattattcatgattttaaattattaataatttagaaggaaaacagatttcctgtgactatatggcacaatatagtacataaaattgggtttgaatatttgttttctgcacatcctctatagttataaaatgtaactaatgatttgtgtttaatttgtctctcaatccaattttggtagagcaagatttaaaataaatggctgtagatttcctaatttgatcagggactctcagttgttacaagtacatatgttatttcatataaatgtgaaaaaaatattttatgtttttatatgagatccacttcttatgcttataatattatggctcccagatgttattaatgtgaaagtgtttagagaatttcctctgaaaatgtcatcctatccctacacaacccaagattattgcaatagtttcacaaatgtcatggtttataaccttacatttatgaagaaactgttgacatcctatctttagagaatgagaaagaaagaggaatcattctgaacagaataattccaggaagcatcttggcctgacacataggcctgcctagactcggtagattttactaatatgtctttccaattcatttgttgactatatttagctttataaagttaaaggtgagagagcctcaatgtttaatatagcatctactccaatggttctgaaacactaaatcttctccttgagaaagtttgcaccagaccaacagaaagtttcgtatatttgtgattaagctacatttatcaaattagaagcacgattcattattctgacatgatctttaccatttttaaaatttataatagccatgattttatcaaaggataaatgcagagtataggatattttcaaaaatgagctcacctggcaaactaaaagtaggcagtgtaagtcgccacattccaaaaatcaatatttaaaattgcaaattccagaaacagatgaggtctgtagttttactagtggaaccactaatacagtgacttgagtatttttttttcacttagtatattttaactatcttcatactaagaaaatacctacgaaagtaagtctagaaaacccaatatcagcctgtcaatatttatattattcagagggatgtatatacatcttaatcttttgttgtattcctatataattctagctatatttaattctagttacaaattaattaaaaataccactcttaacttttctgggcatggggttgtaaccatgaaaccaacttcttatgccttctgaaaccaagtcaaaagtcagacaccttaaaaatgcagtcttttgtacacaaatgtacaaaatagccccagaatagaaacctaattgtgagtccttagataactaggactagaaatccttcatcgctacactcctggtgcttaggacaacagtgacaggtaaaggcactcaacagactatggaatgagcagattctaagagtcaatacttagggtgaaccttgctctatcacaatacttctcaatctaaatgatactgcagacctagtaatataatttgttccaagccggaaaacttcaggaatgtgcaagctggaatggggaagaaagaagtcaaatcctttatcactgagaagagaaaccaagggagaagcaggtatggagttccgatacgtgcaaagcttcgtagatactaaactggggacaaccaggttaaagtgaaataacattacagctatgtacaaaacatgtttctgcttccaaaccagggtaattaaaaaattagaatgcagttatttattttattagtattagctattagttgagatcaatttttaaactttaaaatgcagtcactttaattacaaacttttactttcagactcacatatgcacggaatagtggagagtagagacatttattatttaaactagctctgacaatgagattcatttaacaagctatttcagatcaaaacagaattggggactatcaatcagtttcctcattctcccctttcatttttggatcagctataaatagtcacaaaatgtgtccatttggcatcttctgtggcttccagggtttaatttcaacactccttgatatcacagaatcactttaaagaacagagaggttgcagatcaattattgtagtcatgtgccatatagactttgtgtgactaaccccagactatttgtctattttaataaaaggaggtcatgattgtgcagaaagtgaaaaactttttattaatctgaatttagcatatttatggtattatacccctaacataatagtatacaggtaatatcatctgatattttgtttgaaaacccttatgttatattgctttttatatctcaccaactaattgcttttctaatcccaccaaatttagtggtgtccacttaactataagactgtggctgacactgctgattgtatatacgatatccattctccctttcattcttatttatataagcctaatgttaatcacccaataatatgtctagttaaaaaaaacaagctcctcagcttccctggaaggtaggggcaagtatatgaaattgttcttgccaaagaacaggttgtcagagaggggcaaggtagctgggtttatataagctgaggattcctaagaaatccttgtttccctgatacagacaccatcccttcctacttcctttccatttctcttctttaccctggaatgaggagatagtgccgtgggagcagtatcgccaatggtcgtgagatgacaagcacaggacaggcccatatgctgaggatggctggcacagaagaaagaataaaaggaaatcacatatttgagggtatcatagaatcactgtactagccctagtttgctacctcctgatatccttttccacaagaccaacaaacccttagatgattcaaccattgttagttttctattgcttatagctgaatgcattttaaactgacaaaaaaagactttctaatgattttgcaataaagactttttagcacacctgccatacttttaaaacatggccattttgaaggagctggtgccagactacaatatttcaagcaaccgccttcttcctaagtttattacattgacacacattaatttaggttttgttggagttaatgtttccttcagtcatttctttgcttacaaaatactttttaaagtaaatatacacaaattatctaccttagaaaatgcaaaaaagcagatatttgtaagtcatctaagtcagctcttgcttcccttcctaaactattcattaatttggtgtaaagtgcattataactgaatgttgttcttgtatttcatggacaccagttgtcatgctaatgtgcacaaaaggttttttccagagtgaatgcatcaagtaaatcccaatcattgccactgcaaatgctgacagactaaacaaaattgctgacatcttccaaaatctgtctagatagatcactgctgcgcaaacatcattgcagttcctaatgaaaaagcaaataattcccatttgacatttatcttaatttcaaaataattattatttaatcatatctaaccatttcctatagttctcttgtaattcattgtacatagtgtgaatttcaataaaattcactttcctcttcctctgttttacctaaggattaaaaatgaagcaagctaacctgtccttctctgaaaacctgtacattaatctatgcttacaccttttgtaaaaagctatattttattattttattgttaaattgcactgtgaatttcaaatgtcaggagacattcacacacacacacacacacacacacacacacactcactcacgcacagagagaaaggaagagaaaacaaagagacagaatttcctccctaccaaaggggctttgttttgatcagcaagtttttttttggctcattgaactaaattcacaaattaacaaaactccactatgaagatctgatggaagaaggaatggaaaactcttgaccttttggatcccagtcccctgaccggcccttttcatcttcccttattaaatggaaatgatcagtatgagctttcagatttaggcaagacagctaaaagcaaaatcttgccttctgaaaaagatggtaaaggaaaaattggagctaattaaataatgaaatctgtttaaatgaacctatttatgccaatgaaataggcagaatcattcattatgtaaatatgacctttaaggacatatcacaagtaagttgtgaataataaccccatgaataattgagaattgatggtatttaatatttattaagtgactttcacatggatttgagttaagtaagtcaattccatgggcccagtgatggtatccatttaatgatttattcagcctctaaatatgatagtaatgttctgtatgacagtgagctagaaattgcacaatggagaattcaaaatgaataagacactgtccttgtttgcaaagttttcatgtggcaaatcccttaaggagaaaataacacttatttacaggatgaaaaggtcagctccacatagttgatcagcatttagagtttgaaataataattgggtgaggtcttgagggatggatttttattggtggtgatattaaaaagagagaatttcaagtatatggaaggtcaaaatccaagggcaatgaaagttcagaaaagtaatccttttgagctgggatacatgcaaaacgtgagataaaatcctggacagatataggataaaaccatgactttaaagggctcactgaagagtttagattattttgagaagtcagtcatggagacagaacaaatggatgagatgtagtataataagttccagtgtctcccataccccaataaggatgtacatgaattataatctaacaaaagagaaggaagcttggaaagtgttaggattctatttctttctgctttttctacttatgattacatggattagaatgttatctgctgtgctgaaacagagttgaaatgttactttaagtaatctggtaagtatgttattaaaatgactattttaccaagattcaaaaaattgaaatgtcaacatatgcctaatcatcaatgttgtttttgtgaatggtaatagcatccatattaccatcttttccttcctctttcttcccttcttcttcacagtctttaatttcttaattatttaacctttgtggatgagtattaagcatataagttagaaaataccaattttattactttttaaatgctgaaataattatttttaatgagagtattattgacaaccacttcttgttattactgaaagagtaaacttgagttttgaaccaatgggttaaggattaaatctgcattaatctaaatagggaattttaaggaattttttattccagagtctatggtatcataaacttctatttaatgaaatagattatcagaatcacctttcaatttcatggtctgatgtaaaaaaaattctccctgaaacagatacagggctataatcctcagattacacgcacacccaaacacacatacacaggtttgtatatatttgccacctccaacccaggtactggttttatttaaagcattcattttttttttcttaaactatgctcaaaccatggttgacagtttaagaaaagaaccaataggataaaatagtgtattctattcacagcaacagactgaaatagactcaatatctgatgttgaactttccaaatatatacagaaaattacatataagttataactcacacaactcttctatctccttattctatttgtcctaagaatttacaatagaatgaagttccttcaagtaagagacattacagtgctgcattgctgagacaagcctataaagaaaaggaagacggtttgattttgtctactgtggtctccttgtagccctggaatgtgaaaatgtacaaaataatctaatatctcataaacaaagtaaagtgggtttttttggccagatattttctagatagatatgagagaactgtcaagaagcaaaagatattaagataactccatgtattaaatcatttcgatttcattggatatgtcatggacttaaaaaaaattctcttttccttttgtaaagaaaagtcacagttaaaaaacacagaaagaaaagagtttggaaatgtgtgagggagagatgaaaaaagctctctacaactggttcagagattaacctgagtgagtccagtcacgtgcaaaggcttgcggaggtctagactgcaatgtctgtaattgaattttaaactggctttacatattcccagagagagcatataccatgatgtgctcatgaatgcaagccttaataggaattacatactttcacaagcactgtgcttataaaaccccttgaaccctattaatcctatattgaggttttatgtttcttctactcagaaaaatatcagatttatctattgcccataggatatttgttttaaagtgatacacttcagttgggcctgtctcctgaagaagttttgtataaaaattattcacttgaatgccaatggaatagttgagtacagaatcccattaatgtatcatagagtgatattgcagttatgaaacataaatcttaaagctgtgaatctctgcatataaacagattgggagtttagacttgagatgtatataaaggaatgattactaatgtcaaagaatgtaatttgaggaaatattttgttttctattaattgtattcaggcaatctgcagcccaaagtttgagttctaaattattcaccaactgccttgaagtaccatcaaacaaattctaagatgtgacacttgagggggatccttctgcctcaattttttaagtcagtggaataggactcttcaatatatcaaactctgaaattaaacaagctttacaaaataagaaagtgagaatggtacattttataaataacactgagattacatatcttgcgttattcaccaaaatatattttagatggaatagatttagtttttctaaatataaaaagcaagcatgctaagcaaaatatctatcacagaaacaaaacttttttttttcgagacagaatctcgcttcatggcccaggctggagtgcagtggcccgatctcagctcactgaaacctccacctccctggttcaagtgattctcctgcctcagcctcctgagtaactgagattacaggcatgtaccaccacacccagataatttttaaatatttttagtacagacgggatttcaccatgttggtcaggctgatcttgaactcctcgtctcaaatgatccatctgcctcggcctcccaaagttctaggattacaggtgtgagccaccccatgcctggccaaaacaaaacttctttacaataaaaatttaaaaaacaaaaaacaaaagactagaaatagttgcttaaaataaagagtcaaatttatgtgacaaaaagaaataaaatacatgtataacattgtgcacatgtaccctaaaacttaaagtataataataataaattaattaattaaaaaaaaagaaaacaaaccaacagataaacattgattcatcaggtagatattgaaagattccagcagagagttcaagcaaatggaaatataaagggtaaacaaacaaatggaaaataatattgagatagtattttataccatctaaagacaaaacatgttaagaaaattatgatattcaatacagctaaaataacagaatattctggggcactgtaacttgatataaattcctttgaaaataattcttacaattggccgggtgcagtggcacactcttataatcccagcactttgggaggctgaggcgggtggatcacctgaggtcaggagtttgagaccagcctgaccaacatggcgaaacactgtctctactaaaaattcaaaaactagccgggcatggtggtgcacacctgtaatcctaggtactcggaaggctgaggcacgagaattgcttgaacccgggaggcagaggttgcagtgagccgagatcatgccactgcactccagcctgggtgataaagtgagattttgtctcaaaaaaaaaagaaaaagaaaaaaaggaaatgattgacaaaatataggagaaatcatgaaagaagcaatcagttccacagaggttaaaaggtatgtgcaataaagatgttcacagcagcattaactataccagtaaacacctggaaacattccaaatatctaacatttgaagaataattatttcaaaggtaggattataacggttttaaaattttcttctttgcaatttttggaggcagtcttcaaacatttaatacaaaagtattactttggtaatcagaaaattacctgttaacaaatatttaaaaataatatgtgcataatataatatgaaaaatgaatataaatgtattaggttacagatgtttttcacagcaatgagaaattactaaggaaacgacttaatactgttatactctttgaaattctctttggtaattctgcatttacataataacatttaattaattatagcactattgtctaattgagtacaatgactttgatgacataacataaagcctaggcttttaaagtcgcattcctggaagtgagggcatttggaataatctttttttaaaaatgttaaaatgttattttatgactattcttggttttgtatagtttctgatatattacaaaatgcctttcggtatgtattaaattccctagctttgtttatagtagggtaattcatgcgtattggacaggcccctgaaatttttgcctagaaatcagccatgaaatttgaaagaaaaaaattgtgacctgggcaagttccttaatcttactatcattttcaatatttgtataaagaaagagttgacatacataatttcttagcaatctaataggccacggtattgtgaaaaacaactttacaaatgtaagaaattaataacataatatttcattaatcttaaattctcacagtacagtaaaacatattgttagtcttatctataaaatttcaaatgtccacatgaaaattaaaaacaagcccatttagattttgcaaagatctgaatgtttaatattatttttatatattgctattgacccaatgtttaaatcattagctggatttttaccattttcatgagtataaatgaatgtgtatatatgtgcatatatgaatccatatagttatgcacattcacatacatactatatataatcaacataacatatagaatcaaaatattatttgtcttttgacttcccggttttacaaaggcagcattagacaaagctatatttctcaaaacacatttgtttttcaagaaaaaatatgcagagccctatttttctatcagttcgtattatacattaaagatttattatgcacttgctactgatgttaaaatactttaaaattcagtgagcaagagatactgtttctatggcatattttgcttcaaatatccacatgcataaacatgaatagattgtgggacaattattatttaaataaatgtctcaattttttatagacaggctaagtgatacatgcaatgctcagtaatacacgcaatgctgagcaacacatgcaacagcatacataagctgacatatttgtaccaaacatcacatttgtcatacaatgtattctgttgtcagatttgcagaatatggggcagtacaatataagaatgacaaattttgaacaaaaagagttcctttccccatgaataggacagagaaaagtggtgtaatatttattataataaatatcttagtaaaacatataaaatgcaatcatgggggggaaggcagaattatttgttttccaaagtgcaaaaaggaactgtctcttttgaatacacacctattcaagaacatactcaagaaaagtaaacacataatagtagttacctctgggtgggaaggaaaggtgatagaattggggaagggtacactaggggccccagttttacctttagtgttgtatggtttgaactctttgatgcataaatggctacactatcatctatttttacatgcctgaaatatttaatattttaacataataatataaaatatatttctatactctagagtatatttatctttaatattctataatttgtaaaataatacctattagtttatcattcatgttcattctaaacactacgcatacttcttactcatttctttttatccttttcaatctgtatcaaaatagtagagctttacacaaatttttatctaaatatcatctttcaattattttcacagtgattaaaaacaaagtttaaaaaaaactagaaaaaaataaaggtgaacattgacctgagggtgaggaaagcttttatatgaatgaaagtcatagatcaaattttccaaaagaaaagtgattcttttgtctatagttgtatattaaaaagcaatgtaataaattagatggcaagcaacaaactgagaaaaatattttttccaaaagtgtgagggagaaagggctgggtgcagtggctcacacctgtaatcccagcactttgggaggccaagacaggtagatctcttgaagtgaggagttcgagactgacctacgcaatatggtgaaaccccatttttactaaaaatacaaaaattagctgggtgtggtggtgcacacctgtagtcccagctattcgggaggctgagatgagaggatcgcttgaacccaaaaggcagaggttgcaatgagccaagattgtgccactgcacttcaccctgggtgacagaatgagactctgtgtcaaaacaacaacaacaacagcaacaacaacaaagacaggaaatgttaatgtctcaataagacactaatgtacaattcacaatagaaaattcttttacactataaaaatatttgcagcctcaatgttaatcaattgagataaattagattttatccaacatattaattttataaatacttaactataaaaaaactcaatatttgagatggtgcagtgatacagcgatacagcagtgtaatacgctacaagcacactgctaacagtctctgaaaagcagaacacgatgtcacctttaaaatgttctttaactctatacatcatatttctgagaatgcatcttaatgcaccaatccaggattgaccttcaagtatgcttatcttaaaacaattaaaaacagccaatgtccaatatgaagagaatggttgaataaaaggtaggaatataaaatcatgttatagaagattatggaatataggatggtatgaaataacataaatataaatctcagtttactatttttaaagactaagtattaaaattctcattggaagttgaaggtttgaatcctaatcactccaacactgtacaattgcattataaaatattttctttacacattctaacacaagagttagtgtatcactagataaaagttccatatgagttatttataaaagtagaaaatactttattgctgctggtgtcctgaaactgaataataaattcatctataaatcatttagtaccttaatgtctgtgggcccacttactgtgttaagtgcagaaaattattaacagtctggactttctaagtacataattttctattgtttattctttgttttataaagtgcccacatgttcaaaatatttttgataatgaccaagtagtctactttcttgatgacctggaacagtcatccttttttttcttgctggtatttttgttctaaaagggaaaagagtgtggaaaaggataatggattactttataagcattgtcttgacgacttggcaacaataatcaatactcaaaaacttttaagttcttaacacatttataccttgtaaataggggcacaatcacgtggaattcataggcagtttgcttttcttgtaccatcactcaattttttgaattaaagattttatatgagacttcggaattaatgatacaaagatgcatgaatgaaaatagagataaacccaattgtggaattaaatatacaatcagtagctaagaacaaggagataatgatgcttcagcaatcttaggaattattcaggtaaagaggggcaagcacagcactttgcactgaagaggactttagagatcaactacccaacactctccttttaaattagaggaaactgagcctatgaggatttaagtaatttgcctgtgatcactcagctaactagtagcataggaggaacaacaataaaggtctagatttacagtaaatttatctattaattcatttctacataactgcttcttgcattcaatgcacctagtgtaagtcaaagtcaggtatgcaatatggaaaatggtttagtctctttgtactccaaatccaggatcaaaacaacagaaaaataccagaaagacaaaaacaaaacaaacaaacaaaaacctcaagagggcactgagcagagatactgaatcaatgacaagctcttcccaatctccttccgtccccatccccaaaggctctgggtcagactaaaaagactactgaactacatcaaacaatttgtgtctatgtcccacattttcctaaatgtgtgaccttggacacttttctgtgccatcctgaacctcagttttatcatctagtcaaaactcaagatgatctctgaaaggtcccttcttcctatatgtcactacgcaggtgaaatacaccaggatttgccctgccttgtctttctgttctttttaaaacccttcgtccagtcaataagcccagtttttaaaaattcttgcagtttctattcaaaagaaaaaaatctaaagggtgtgtctaataacaagtgctctcaatatgaccataattgtactattgacattttggtgtttcagggtaatacaatttactgaaaaagaagaattaactctggctatataaagttgccgtatatttatttaaaatttcacgtattttcttccacaaaacttgattttcctctttcaaatcataggatatgaagaacttttcattagtaacatgaaagctactgactacatgtctaaaagattcatctttatttacatatctaggttcttctcttttaatcaacctgaaattacgtttttctagtagttaaaactaaacattctcttagtaaaatacagaagataacaggagaagaaaaagctgactatggaaaatttttctaactgtatgtcatctaagtttaacggtaaacttctagtagtctctcgggtcctaaaatgcttcaaatgaattcataatctgaatgggcttttaaacaacattgggattaggagtctggccctaccttctctggagcaaacatattgttgagaatggtttgcaccagaaggatcttctatcaccagtattactgttgttgttactgatatcaattatcatcatcatcatcatcatcatcttcttttggggggagggtagggtgtggatggagttttgctcttgtcgcccaggctggagtgcaatggcgcagtctcggctcactgcaacctccacctcccaggttcaagcaattttcctgcctcagcctcctgagtagctgggattacaggcatgcactaccatatttggtgaatttttatacttttagtagagacggggtttcaccatgttggtcaggctggtctcaaactcctgacctcaggtgatccacctgccttggcctcccaaagtgctgggattacaggcgtgagccactgcgtctggccatcctttttgcatataatcatttataaagtacataccccacaaattatcatgtttagacacatggacaaccattctatactattcatgcatgttatttattcctatttagcaagtgagaaaaccaatgttcagaaggattatgagatttactccattttatatccaaaatatagtaaaccaggctttgaacaaccctaattctagaacttcttttatctgtacctcaatgtggtaagcattatgtgatgtaggcacaagggttttctattttcataccaggtgtgcagtaatcaggcattctaaatttagcccaagaaacacacttaggtaatgccctgaaacagtcattgctattccttatctgggaattctgttatcattttgcatttgcaaaaatagtcattctataatatagaagtattctttcacattggcctcccacattgctggaaacatttctttatatttactcttcccccaaaaaagaatgagtgggaaacatagttaatatttattttgaaagaaaatagggcttaataaagggaacaattacatatttagtcaaggtagattaatagctgaggtttaccacttagcacactgcaaacaaaatctaacacgatactattgcactaatactagagcaatcattacaccagtaggtgtgccaaatgtggaactcaataacaaagcctacttaaaatgatcaagtattataagttagtacatgatcagtgattattctataaagtggggtttgggaagctaaacaaaccctaaattttttccttattcttcataatcaaaacacattacagatagacaaaagttaaatataaaaaaagagagcccccaaaaaatggtaaagtaaaaaaagatttaagaagcttaaaatggagtcacatttctaaacatgacataaaagcacacagaggaatgactgttaaaccttgatctattcaaaacattttagaaacaaaagattaaataactccaccaaaaaatgagtacataacttgaacagacatttcttcaaagatgatatacagatggccaacaagtacatgaaaagctgctcaacattactaatagagagatacaaatcaaaacctcaataagatataatttcatgcccattaggatagctactgtaaacacacacacacacgtaagtgttgacaagaatatggagaaattgaaccctcgtgcactgttgataggattgtaaaatggtgcaaccactatggaaaacagtatgaaaaaatatattaaaaatagaactatcttaagacacacttagatatatatcccaaaagaattaaaagcaggctcttaaagagacatttgtgcaagtttcttctctcaaaagcagactcatattgtacaagcccatatgactgctgaacagagtccaaatattctttatttcctttcattgagcactacaatcatcactcaaatcattacacttcaatcagcctgacacagaactgtgttctttaggactcagtagagagtactatgtaacaatgaagatcagaaaatgtctttggaagcatggaaccagacaaaacaaaagatgacagacagatcgatagatagatacagatcgataatagatccatagatagaatgcagttaataaggtgatttatataatctaaatgcttaatgtcagcttgttaaccaatagttcctcactctcataaacagtgtttgaatacatactgccaattgtttatgcctgctcaaattcttaccagtcctaccatctgattgacctgtcaactcaatctctttaaaacattgcatcttagttctgatgcattaagtgtagattttgtatgttaattcataatggaggaatcttatttctctgattttgacatctcttctttcccactgtactgtatgcaagcagtatagaacactttggagttaattgtgactgtaatattaattctagacaaactacaacagaagacacatcatggcagaatatactttaatattcctatattgtaacccacaacttttgatcactttacaaggtcaaactttgttattgctgagcatcacagtaatccaatgactataacaaaaagctgatgaccttaactttccaggtggccctagtataaagcctgactttgatgtatctaaacaagcacaaatatagaactcatcatgaggtctattagaatcataaaatcttctgagaggaagctatctagagccaccctgcttaagagatttaaaagcagacagatcaaagcatgtgtcattgagaatcctgctggttgtcatgagagaaggggtaaaattacaaacccattcagttgtatccattactgtaatgacctgaaatagactagaatgatgaaaatgaagggtgagtagcattgggtcataataatagtaatcacatatcatgtgacagtagtattgaatttttcttttgtacagcaaagacagtgttgtatttttttcctggatagctatggtaacaagctttatttctgaatgcctgatttcctgtctatagacccacacatctgagtaatatgcctatcccaaacattcattgtgatatcaaggatgagtcaaaaaacaagatggacatatgccaaacaattttatgtgaagggtaaaatctgtatttccattgattaccaaactgaattttgcacaggtaaaaagcaatggtgtcacataatcctgcatcttatcagctttcacatctcatgctttcttcaatgaatatggtgttcagattatatggttagggaaagaagaggctaaaaatgcctacatatctagcatgctgaaagaaaaagtctagaacagaaaggttctcttttcaggataagccagtctctagaagttagagcttaggacaatctccaggggaaaaattctcgggtgatgctagttataattctatgctccatggagccttcaattgactgtgtatttcttagagttctccctttaaaatatatttctcttcaaattgacgctatgcctcttttaaatgggccaccctgtatattctgaatgagctttttccagtaaagaactgtgttgatgtaaatctacgttggcaagagcgtcatcagagtcagctgggagtgacaggcatgttctagccaattctggacagtgtgttgaaatatgcttcccaggctgcaagagcaaatgcacaaaagcaagcccacgtcttgacaggggtgacgtgctgatcagcaaagccctggctctgtgagaacataaaatacgcaccaggagcatttcttgaggagaagccaaccaatcaatcacagcaagagccacataatccttacaggttaaaaggtgccagagcttacccttttccttagggcaaaaaaaaagaaagaaagaaaaaaatgtttgcacatgttgcttgcagggcgcactcctaagacacagaagatcgtatttcctaataactgccagccagtacaactaatataaatatgcaagcaggcagtaagaaccaacaattcaaactccaaagagaaagctatacatttcatatttgttttattaacaattatgataatgaaaatattcctgtataaatgttaaaacctggcatcatcttgtaaaagtatttcatgccaacacataaaacctatttatttaagaaaagcaatatcattgtgataattatgtgtataaactgttgtgacaaatgcaatatatatattttttcaaaaatatttttcagttcttcaatatctaggctgaacatcatattcaagaacaggattttgtgtccaaatcatggaaaaaatggcaatttcatattagaaaatctgtgccagggctatacatctgcaaactagcaatttcccaattgtttttctgtatcttctgtcatctgtctcattcttggagcatacacacacggccaagatgtgagaataatatgactttaccagacaggaatgttgaagtgaagatgactgggcagacctggccagtctggtacccaccacctctcccctcaatttctataaatgcagtgaggatgaattactgtttctggaactaattaaatagaccaaagaaaccggccatcccagcagaggagtttgtgcttgtctgactacatggtcttaaaaccaaggtccttgtcttgaatacacaaccgtcaccacacaaagtccaagactgccaggtcattgctcatcaccagatggctctgtaaatcccctactttgaaatccccagccttccccaattcctgcaaactcgccagcgtgactcctagcgttcagtctgtcatcagcaaaatctccttatgctcctgtatcttcagcatgttctctgactttcctgcaccatcttgctctgacactactggctgcccaccgagaatacggatttacttcagccctctgatgcagtggctatttttccttccacatgtttgtacctctgcccctagtgaagtaggagtctttctcattcttctctgctgcttccagaccatgatctcttccttgccctaaaatgtctttgtaactcacatcattaatctgctcccctcctaatccagttttctactgacctaaaggtctctcctctcagtctttaaacattttagccctgtctctctccagcgcaaactcttacataactcataattatcttttcctcccacggtctcccagtttctggatctcccttcagataatcttacctgaaacctcctttccttaccataagcaaggccttgccatgacagataacggtgccccataaccactgttaagcgtctctccctaccttctctctttctagctcatcccctccagtattctgactccaaaaatcttccaaacccaatgagtcctccagtgcattgaccttagaagttgttctgaccctcaccaaacttatgtccccttttccttagtgagcttagagtaaatatggcagcataatcacttctttgcatatccttttaaaactcagacttcactgaaatatctcatctctgttaaaccaacctttttcaaaccgtgcttgttgtggcctaagcagtcaatgatagttgaggaaaaacacaaccatgatgactttgaatttgtaactactggcctgaggtggctccttagtgccgtctgggaatttcacatttctctagacaaagcactctctcctcccagagatgatggatcatttctcaccttctctctcctcaaacctccaacatctgttctctgtctttacattgatgagcttattattttatcacaaaatagaaggaattaagagacacttttcatacactctgaaaccagatctatcaagatactgacctcctatactctcagactgtcctactcttctttctcatttattgtgaggactgaacaatcagcactcccattaagggcaactccttggcttgtgcactatctgaacttctccttacccctattcccccaaagcctcctcaagaatattgctcctgcaattgtccccagtttctcatgatcaaatgtcccctttctgctgcttctttctcaaaaccacacaaacataatacaattgacaacacaccctttgcccatatctcatttttcttcctatcccctccaactgactttacaacaaaactccaagagttaacaattgccaccacttcttttcccatcatctcttgaatccacttgacttagtccttttataaggaggccttcacctccagatactcacaactttgagtagtcctctctcacactgtaccagggttggcacatgtgagcagaagaatatggcagagtaatagtgtgttgctgccaagtctgggtcataaaagtcgttgtggcttctactttgcactctcttgaatcactgactcctgtgcctgaggtaggaacacccagccatcccattactgggtacatacccaaaggattataaatcatgctgctataaagacacatgcacatgtatgtttattgcagcactattcacaatagcaaagacttggaaccaacccaaatgtccaacaatgatagactggattaagaaaatgtggcacatatacaccatgaaatactatgcagccataaaaaaggatgagttcacgtgctttgtagggacatggatgaagctggaaaccatcattctcagcaaactatcgcaaggacaaaaaaccaaatatcacatgttctcacttgtaggtgggaattgaacaatgagaacacttggacacaggaagggggacatcacacaccggggcctattgtggggtggggggaggggagagggatagcattaggagatatacctaatgtaaatgacgagttaataatgggtgcagcacaccaacatggcacatgtatacatatgtaacaaacctgcacgctgtgcacatgttccctagaacttaaagtattaaaacaacaacaaaaaaaagaacacccagccctttggagaagcacaaacagtgaggaactgaagtcttctgccaacagccagtgtaaagcaaggctgcctgcggacagcaccatcttagaaaactgatcttccagtcccagatacagcttcagatgactatagccttcactgacaacttgagtgcaatttcttctaggaactttagtcagaaccagccagctaagctgctccctgatttctcagaaactgtatgcaataataaatgcttgttggtttaagcattggggaaatttgttatattccactctagtcagtcctgtatcatcactactctactgatcgacttgtgttgtatgccaccaattggctgcatgttgccaatgcaatgatcaattctcagttcttattttagttgacctatgagcagcatctgccacagtttatcacttttctgttgttgttgtttctttgtttttgagacagagtcttgctctgtcacccaggctggagtgcagtggcatgatctcagttcattgcaacctctgcctcctgggttcaagtgatgattctcctgcctcagactccccagtagctgggatcacaggtgcctgccaccacgcctggctgatttttgtaattttatttgagatgaggttttgccatgttggccaggctggtctcaaactcctgacctcaggggatccgcccaaagtgctgggattacagccgtgagccaccatgcccagccacttatttctcctgaaacagtttgttcatttggcctccagatatcactctcaatttttcttcaacctcactggcctctctgctgagttttcctcattttcctgatttctagattttaaagtgccccaactgtctcaggtcttttctctatatatacttgctccctgggtgattcattcagacttatcacttttaataccacctacattttaataactctcaagtgttcatctcaagtgctaatctgtgctccaaacttcagactcatacattcagttatctaagtgaaacctccatgcagaaatctaagaggcatccccaaaataaattttttaaaactaaactcctgatccacctcccctaaaaatgctccttccacaatcttcctcagcttgacaaatgacaactacattctacctgttgctaagtccacaaacttaagagttattcttgattcttctttctcactcttcacatccaatgcatccacaaattctgttggctgtgtcttcaaatggtagacagaattatgaccttttttttttttttttttttaactacttttacctctatttctctagtccacactgccaatacatgttacctgggttacttcaatagtttaactggtctctgcttccattttccccacatctttactttctacacaggagccgggatgattcttccaaaacttatgatagactgtgtcccttcctaacacagacattcctactactaacactttttgcttcaatacatcacagtcatcaccaaggaatgacccaagtctttactacaggctcaaagcactatgtgatctgatgcctttctgtggctcctacctcattttctataacttcccccctccctcaaatacgccaaccacatttggcgtacttgaaatcacaatgaaatgtacttctgctggataatcatatagctcgttcagtcatctctttcagatctctgctgaaatgtcttacatacaactctgtaactccttaccctgacttattcttctatactgtacttgtctttctctgacccactggaatatttatttgtgtgttgtcttctcctttattagaatatgtgctctttagcctgatgcagtggctcatgcctataatcccagcactttggaaggccgaggctggagaatggcttgagcccagaagtttgagaccagcctgggcaacatagtgagacccccatccctacaaaaaataaaaagttatctaggcctggtagcatgtgcctgtagtcccagctacctgagaggttgaggtgggaggcctcttgaacccagagcccaagaggtcaaggcttaggtgagcagtgatcatgccactttactctaggcggcctggacaaaagagtaagaccctgtctcaaaaaaaaaaaaaaaaaaaaaaagtatgccccaatgtatggaagactgtctatttcattcagttctctatctccagaagaacaataggtacacaggaaacactcaaactattttttgaatggatgaaaagaaaataggatatttcactcctgactctcaccttggtgagctagtgataaaatagagaaaattaccttcagagtaagatggttttctgtgtccagcccctcagaactgctagatgtgttctaagaattgtatacttttgcaattcagtaagaaggaaggcacagtcctcacgtaaataatgcctctgttctatgcatcagaacacaagtgccactagtagaattaacacatctgatttgaatgaaaacagcattgtgtatctatttcagaaggattatcttgggaaaagtagaagagcagtagctagctgaaagatggtatagattggtctaattgaactgagtctcaaagtccaactattgaaagtgttcagtgcacatacttgtggcttagcaagcttagcatggggtaagaactcaaaatgtcacttcctgttatgtggagtgaagctgttaggaaagataacatcatcatgtttcttttatacatataaatccctggtgtgtgtgtgtgtgtgtgtgtgtgtgtgtgtgtgtgatgtgagagcgagcgagcgagcaagcgagagcaagagagagagagatgttagcaatccttcaaaatctgattccaacctaccttccctagaggcactcaaactcacctaaaccccatgtaatccccatatttgttcacactattcccttggtgagaaaacacctcctgtcacttcccctccttccacacttcactgcagttctctccctgctgaaatctcccatgcttcacattcatatcaaattccttcctaggcccctctctctttgtgaaatgtgataataaaacctaaacctaatcaagttgcagtgaatattcaatgagatcatctaagacaatgctcagtagggtgcctgggacttctctgtgactatttcatctcactcatgaggtcttaagtgattcctagtaccagatacaatgtctccctcccataaattccaaccactctttatgcttagttatggcaactattgttttatggttgagtaatcatattctaacacctgttaggtcataatccttgagaacaaagacaatgccccaataacatcccatatagtaatttgtacagtgtagacagagtatgtgagtcaaattaagcttctagatttcaataggctcagatcaccttcagtgttctatcaattgtatgtttaccttttatttgaaagtactactgtctttcaagaggtctttttgttaaatatatcatttgaacttctaaataattttatgaaacatgtatgaattagtaatagttccacttacagatgaacttaattgtgatttgtggaatttaaataaccctaggatcccacagtgagtagcagagttggactatgcaatagattcctgaacctctttgtatatcacaagactgtgctaggtgctagggatacacctgtgaatgaggtagaactggttctccccttcacaaaatttactccctagggcagtagttcttaactgaaaacaatccctcgtcccctacaagggaaaactggcagtgcttggagacattttgaattttcacctcatggtggaaattaatgtcatctagtgggcagtggccagggatgttcttaacctcctacaatgcacaggagagcccccaccacaaagcatcattctggcccagtcatcagttctgctgaggttgagcaaccctgctctagattcggcttcaaaacgaaggatgtgaagtatccataggacacaataacacatagggttgcagagataggtgcagaactgatgacagatgcttagatgccatgttaaaggtgtgaactttatcctacagggcagggatcggcaaattacggccagtgggcgaaattcagcctatttgtttttgcaaatacagttttattggaacatgctaatgtccatttgtatatctgggcttcttttgcactaccgtggtagggttgaatagttgccccagagaccatagggtccgcaaagcctaaaatatttattttctggtccttttgttcacctctgctatagatagtggacaatcaaagcagaactgtagggtaattaatgagacagtataagtaggacatccttagtgggaaggagctagtggcacaaagacaagttagaatgttattgaaatagatcaaacacaaatctaagtattaaaatacctggtggtattgggagggaacagaacagcaagagataataggtgaaataatccataggcctaggcagaaggagggcaaggcagaagtcaaatatgattttttctggttttttgggaagataatggccagataaacagaagtagaaaaatcaaaaaggggggcacagtaagcttggttttgtgcgtgttaaatataaattaagagtggatcttccacgtggaaatgtccagaggaggcatatggaacttgagcctgggaaatgaggtttaagagtagggtttattaaaagagctgacagttggaattgaacagaggagagacacttgtggtgcagggaacatactgaataaggtcaaaggaataattatgtaaccgggggtactttcaattaaggtgctggaaacagagacaatgaaaagaaaagggagatctcatatgaataaagttaatccagtaaatgagacagtatcaacaaagagggatgagcatcaatttcaaatgctaataatattttgccatgactaatactgtgcatatcagtaagtgactttaaatgcaaaggcaatgctgctttaagtttgtttgtgtatgtacgtgttcatttgcaaagaaaactctcaagatgaatgtaagataatgtttctctttaatttatagctggtccaactctgacttttcttggaacttctgtttttttacttcaacgcatatcattgtcttctgaagtttctatcaacagtgtaaaatgaggagcttatgaataaagatgttcttttaaggccaggtacagtggctcatgcctgtaatcccagtactttgggaggctgagacaggcagatctcttgaggtcaggagttcgagaccagcctggcaaacatggtgaaaccccctctctaccaaaaatataaaaattaggcgggtatggtgttgcatgcctgtaatcctagctactcaggaggctgaggcaggagaattgcttgaacccaggaggcagaggttgcagtgagctgagatcgtgccactgcactccagcctgggcaacagagtgagactgtctaaaaagatgtccctttaagacagtttctcaacgtatggcttccacatcacctgtagggcttacaaagtcgactttctgggcatcacatcagacctattgtgggtgcagggctggcttcacaggtgtgacctatgaagttatacaggatcctactctcagaagggccttgtgctggattgaatgcagtgctgttgccatcatgaaatttgtaatatttatttgcgtaacgggccctgtattttcactttacctgggccctacaaattacgtagccagtgctgtgtgagcattctagcatggaaagtaattagtttacagagtaaaaaagattacagggtagaaaaatgtggttccttacttagctctcatttatttgcattgagacatactttttaaaacacccatgtttacactctttggaagtaaaacttggaatctaccattggcaggtacagaattttccacagaacattttttttttttttttttttttttttttgcatctgtgcagctaccaggtaagaacttaataattacagtgtgggaaaacagagtaccaacatactttctgcttagggattagcatcacccaatccaagttcagtgtgtttacctgcaactaagggattgagaacagaagaacttctgcaagaacaaatgtccctcttcctatggtggaagtatcagtggttcaggttggtatattagatggtttgaggttgtacaaagatggtgtttggcatagctgatgtggcttattgaattttaaaatgttgaattaaataaggagaagcttatttcctttccaaatccctttcagtaattcttattaccttaagaagaaagacttaattgtggtctttcatatgtctatattatttgctaaatgccattttaaacagagaacagacctcaggctcagagtctttggaaggtcatggttatctagctaaacttgaatctattttgccttgtttattgtatattttttcaattatcttctatgcataataaatgacgctagttccaaattacagtaatatacaaagctttatttttaaacatatggccttttaaataaaaatgtaagtctactagaaatattaaatgtaaacagtataaatggcccacagttgcacctaaaattgtgaaggtgattcaagaatgatcaatgtgttagtgaaactgctattcttattagtaagaaggctttattaaaggaagcctggttctattcagaggagaactgtagaaatcagccttgtgcattatcagcctgcaattcatatatattttagttattagtatccataaatcatacgctgttctatttggcaatcactcaatagaaggtcataaaaaaaatcacactgcacaaaataaagcaaagtaaaacaaatactattaacctaaagaaggcaaacaagcaggaatgataatccaagtaatcttaagtcagaaagttgcttgcttcaaaaggtcaacaatacacacttcaccatttataaatgtgaaattagccatgtatgaaaaaaaaaaaccaaaaaactggtaccctactaataacatgaagaggaagccactttattttaataatagctaatttaatcagagggttatctcaaaagggtaatggggaaaaattggtctcaaattactgcaatttaaaaatgatatatataatatttaactgtataaaaatatttatattaaaataatatttctatgctaaaccccttcaaaaaggttttctattattttagttcttctgaagatctactttggaaaaatggtacttaatttctgccagttaaaatttctccaaattaaaacactgaaaatgaaactatgaagggtttttttttgcaaatttctcaaaatcttgacatttcttttgtaagcttaggtcttgatatataatttaactgttatgaattctaaaagataaggattagtcatcagaatttaacaagctagttattcagtaatttcccaagaatcatagatacatttacacagatttttttcagaaatataacaggcataaataattttcaaagtataagctaaatattaaaatgcatgtatttgacaaattattgtgacagaataataagatacagaatcattcatatacaccaaagccaactataccaatctatgtgcatgtaaacccaaaacatacacacacacacacacacacacacacagagacacacactgagtcatggtgacaaagtccacacaaatggttaatcattgagttcaaagtttttttccactatggcaatcaaaaccaacatcaccaggacttctagtctggaagggtatggatccccctgggtgttcagcataaaagacacagcaacagaaggtatgtttctcaatcgatcaaaaaacaactatttattgaatgtatattatacaggtggcacttgtaccttcacagtggatacaatgattgatgaatgtggaggttcttacttttttttttttttttttgaaatggtatctcctctgttgtgcaatggtgcaatctcggctcaaagcaacctccgcctcctaggttccagcgattctcctgcctcagcctcccgagtagctcggattacaggcatgcaccaccatgcccagctaatttttatatttttagtagagacgaggtttcaccatgttgaacaggctggtctaaaactcctgacctcaagtgatccacgtgcctcagcctcccaaagtgctgggattacaggcatgaactaccgcacccggccggttcttactttttaggaacttacagtccagctacatacttgaaatacaaacatgaactagaagacagcataacatagaaaatgacaaataaatgtcaacacattcagtctgagagcccaaggaaagaaagattgcacccaatgaaggtaggtagttttggccctgtatacatttgcttacgaaaaccaaaagtcagaccaccaactcaaatgtttccactttgtttgctcttattaaagcttacactttttaaataatatattgaatcacagaaaacaatctctgaaacactatttctgagaagaaagacaacaatattagcttctagtcccagagatatttccattctaaaaggaaatatctcaagtcaaagagactattctataatgtggaatttggcatgaaggctggcaaagtggaaatggaaggatattgttttgaggtaagatgggtcttggtcctcctctatctggccacctaggtcactcaaagagagcctgtgagtcaggccagatcttgttaccaagcagtttgctgttctgttgcttagtgacttgaactagccggccatcattcccagctggctcttccagagtcaaaccttaacagatttctgacttgatctttctccttagagctcaagacttttttctttccctgaatgattgactataaaattattctctggctggctttgtttttacacctcttatgtaaaaacaaccctgaatcaaatgttctccattgaccccttttcaccaaggacatatatttctcctacacacacatatttttataagaatattttataaggatgtcaacttctatacaagccacatgtgtaaactaataaactgagattccacaccaaaaaagggctctgtctctacctttctgttaactactattttgtaaaatctttgaatattcattgttataacttcaatacacatgcagggtagggtaacaaatgtgaatgtgattcttagcccaaaggaaggtaatgctgaaagaaagaacacacgatggagagttaggaagacttgggttcaagttttaatgctattggtttcatagctgtttagctgaaagatcttggttatgtaagaactttttctgggcctcagcagctgcatatgtaaagtacggttaacaatacttacatccaaccttggttgttttaaggggttaatgtacacaaagtacctgacacatggcaggagctaaatcattgacgtctatgttataattaatctaaggttataaagctatattattatgaacctaagtgtttttattccaaaatgaaatcatgtaatttcttctcagatcaacttttcaagatctccttttgagaataagtgcctcatctgaaatacttggagagtatttatgtccttaaaactgcacataaaatgatttttctgttttgcttatttacagtagaagagactgatgtgttaagatggtataaaattgaagtctagtaaaagagaattttaaattagaatctttacagtgatctatacatttccctatctgttacctaaaattatgcctttcagatggtggcctaacgtgaataccaccaataccttcattctgaaggccctgaatcctatttatgagtcacagaattattaaataattctgtttcctgtttttacccatgtagcatctaccttactttcttacagcagcaagttggaacttgtttctaattgctaatcttaaatagactgtagtttgttatcactttgtaaatttaattagtcattactttttacttgtaaatgccaaatgcctttataaccatatgacttattaatagagtctccaagtcaaaaaggttgaataactaaggtcaagtatcaaatgaccagaagacctggaaatatgtgatttcaatatactgaatgaatcgcagctttaaaaacatgattttttaaaaagcaaaaccattaaaaaaaagacattattttgctacattagagatagtaaagcttcttcctgaaagtgctacttgaagaacaaatttggtagctttctatctaagaaaaaaaaagtgctgaaactcctttagttatctgaatacataggagcttttcaattataaagaaatttacacaaagaatattttttaaaaaatcaaagccatgattttcattattttaatgaactttaagattcaagtttttattttcttcttatcaacatttctgccaagtttgcaagaaagaccatgtcttcttaagaagagattttaccatcagtagcaacggcttcagctcgtacgaacaggcttcacatcttttctctttaagataaatgtcaatggtcatgggaagcacacgtgaataataagctgcaaggttatccaaggttttcttcacttttttctcaatgccaattgtcataatgtaatccctgtaattccttaaacatgacaagccaatcggcatgttctttaaaaggaaaatcttcctcaggtcttttgatttcgtggaaagccaactatgcctttcaaatggtacagacaccctcaacttgcagcgcctccacctcccatgatttccacagagggcaacagccagttatgccacagacatggctgaaggttagggctgactggtcttccccaaacattccagcagcacttcctggtgtgcttctcagatgatttcccccagaaacttgctccccaccttctggtattacactttgcctacagccctcctctgggttcctagttcccaggagactggcagcaatgctcttctccgggtattattaccataagagacagagaaaagataaccttaaagctaagcagggcagaagtaagagagatggaacgagggagaaagagacctcaaagagaaatcactaaataatggctttgaaaatctactcagttgtttgtgtgtgtatatgtgtatttttactctacaaactctaagtggctgtatttctcttttataggtgacaaatggtttctttccccttctatgacttgcaaatttatatttctcttaacaaccataaaaacaactacagttgctgaagaaataatgactcagaaagcaaatgtttacttttaaatatgagcaactttacatctaatgccaatgcctgataaagagaaatttatagtaaacaaaaaatatggccaaaatcacttatttagcttcctaaacacatttaagatttattaaaagtctcctaaaaggccttttgaaagtccacctaaagaaattattttgttgttaagattgttactaagtacttcttctactgttggatatgttttaattaaaaatacatatgtgtatacaagaattataaaaattatacagttgagtattacctagtcaccatgattcctaaagatatcctactacctaatttcgcttatatacacgctggaacattttcctccattcagtgcatcgagcacagtataaattgacaatgttttcatctagtccttaatcaggaatataatccccatgaaattacttatattagaaaactgtatttggttttaattatatttggaattaaaaatgtttttgagagatatatcataaataacaaacctgatgcatcttagtgaatgctacccatgaatattagtttttaatggttaatgttttcaaagtagcttgaaaatatttcactatgtagcctaaattgactgttaaattcaggaaattacatcttcatttccgttatagtaaaatgactcaatgtttttcattgtgacattcacttagattggagtgtgatactgacagctatagtaacaatattttaagagtataaacagctgggtttttagaggcaaattgacacagagttgtgcattgcttattctaagttctgagaaatgtgtcattaggcaatttcatcattgtgcagacatgttagagtgtacttacacaaacctagatggtatagcctattgctcctagcctacaaacctgtacagcatgttattctactgactattgtgggcaatcataacacaatggttaagtatttgtatatctaaacatagaaaaggtacagttaaaaatacagtataaaagataaaaaatgatatacctgtatggggcactgaccacgaatgcagcttacaggactgaaagttgctctgggtgactcagtgagtgagtggtgagtcaatgtgaaggcctgggacatttccacacactactatagactttataaacactgtacacttaggctacacttaatttataaatatttttatttctttgatataagttaattttggttactgtaactttttactttatacaactcttaattttcttttaattttttggctcttttgtaataacacttaacttgaaacactaacattatacagctgcacaaaaatattttctctatatctttattctataagcttttatttttaatttttttttactttctaaatatttttgttagaaactaagacacaaacacacattagcctaggcttacacaaggacaggatcatcagtatcattatcttcctcctccatatcttgtcccactggaagctcttctggggcaataacatgcatggagctgtcatctcctatgagaacaatgccctcttctagatacctcctgagggacctacctgaggctgttttatagttaacttttgtatataagtaggaggagtactctttaaaacaatggtaaaatacataaatacataaaccagcaacatagttattattaagtataatatataactatatatgctatatgtttatgggactgacagcatggtaggtttgtttacaccagcatgcccacaaacacaagagtaattaatgcattgtgctatgacttcactaggtgattggaatttttctggtccgttataatattatgggaccaccatcaaatatgcagtccaccattgactgaaatgctgttacatgtgtgtactgttgagcattttaaaaaatgatccaggtatatatatatgtgtgtatatatatgtaggtatatagatatatatatgtgtgtgtgtgtatatataggtacacaggtatatatatgtatatgggtacacatatgcgtatatgtgtatatgggtacacatatgcgtatatgtgtatatgggtacacatatgcgtatatgtgtatatgggtacacatatgcgtatatgggtacacatatgcgtatatgggtacacatatgcgtatatgggtacacatatgcatatatgtgtatatgggtacacatgtgtatatgtgtatatgggtacacatgtgtatatgtgtatatgggtacacatgtgtatatgtgtatatgggtacacatatgtgtatatgtgtatatgggtacacatatgtgtatatgtgtatatgggtacacatatgtgtatatgtgtatatgggtacacatgtgtatatgtgtatatgggtacacatatgtgtatatgtgtatatgggtacacatatgtgtatatgtgtatataggtacatatgtgtatatgtgtatatgggtacacatatgtgtatatgtgtatataggtacgtatgtgtatatgtgtatataggttcatatatgtgtatatatgtatataggttcatataggtatatataatatatgtatataggtacatatatgcatatatatgtatatatacacacacatattttatatatatattcacaactctattcctatactacgtactaaaaaagagcaaactgcttaaggatatatatatatatatatatatatatatatatatatatagcttgctctttctcattttatagtatggcatattatggagatatatatacatgtaccatctctatatataaaatggtaaacacacaaacaggacacatacatatgaagttaaaagacaatgacattcaaggaagaacacactgatttcaggatcctctgcgaaggaagaagaataggatgggtgacagctttagacattatctgtaacattttattcttaaaaaaataaaagaactgatgcaaacaatgacaaaattttggcattttaaaaatctgagtctggggtcaggggagcgggtagggatagctttaggagatatacctaatgctaaatgacgagttaatgggtgcagcacaccagcatggcacatgtatacatatgtaactaacctgcacattgtgcacatgtaccctaaaacttaaagtataataataataaaataaaaaataaaaaaaaatctgagtcgtggatatatagatgtgtattataaaaatatgaaaaaattataacttaagtgattataatgctaaattactttttaaaagaatatgtgaagataacaggttttatgacttaaatatgactaaacagcaacttttaagttcccaaagactgaaaaccagcatttctaccttgttcttctaaaacttatttaggccttacaccccaaaactgtgcttaaaattcaatgacgagaaaagcctgaagaatgtgaagaacttcctgatttcaattttcctgaaataaactagtactggaagttaagttttcttcaccagagattccattgactttgtagttcctgctgatgatagagggaatcccctaccagatgaaatctgaatcatgtctataatcactagaactacaaggcattgcatgtttagtaaaagcagtcaaacagattagtgaaaagcagagacacaagagaattctaatcctaacagatggtgccagaccaaaaccagtgctcaacacatactagctagtgataaaactattactaataagcattgagagtatcagagacaagaggcgcaatagaaatctgttccttgaaggaaggaacggattacttccagttgggagaactggaggaaccttttaggaaaaccaggaatttgaaagatgtatttttgcagtgggcagagaagagacaccaaaccccacagttctgcctcagtagtatctctcatttctgccttctcctttcctacagtaataaaactgacatacactcgtttctttcaactcttgtctcttcactctaattcatccacaaatgactgacagagtaatcatctagaaatttaaacatgatcctaaaggttcatgcagaccaaggctggaataatgggcacagagtacataataaaaaaaatactagcttataatgacacccactaagggtccagccctgtgaaaccacttaatttatacataattgtacttaattaaaccacaacccccaatagatactattcccagaaaactgactaacggggaaactgaagcacacgttaagtaacttgaccaaagtcacacaattactaaatgcaaagtaagaatttaagtttagtctcttttctaactgctttggtgctgagtgacatagcacctagagtatgctgtcaattcagtagctattctttaaatggatcatgaaaacccaagagaagtctagataaaaactacctggtaaatatagcatatagaaatgaaataacaggatgtttacttaagaaaagagaagtccctttttttttttttttttttttggtgacagagtcttgctctgtcacccaggctggagtgcagtggcacaatcatggctcactgcaacctccgcctcctgagttcaagtgattctcgtgcctcagcctcctgtggagctgggattacaggcacacatcaccatgcctggctaattttttgtatttttagtagagacggtgtttcgccatgttgcccaggctggtctcaaactcctgagctcagggactccgccctcctcagcctcccaaagtgctaggattataggcatgagccaccatgcttagcccaagagaagtcttttttaagagcatgagaacactaaaatattgattaatgaatttgtttagcagacatttattaagcttccaccattgaccagccatcatgccaagcatgggtataccaaaatgaatgaatagggccctggttctctggtgggttactccaagccacttgccttagggcttcataatggaagggagcaaaaattcaagttgtaggattcccaaagcagatcttggatccatggatgatagttgcagggaaggagacttctactgtttagaagcaaggtctttccaatcaacagccctatcaaacaacagaagtgcttctgtataatcttcatcaaggaggtttgacgagaggttcaaggacttgttattacagatgttattctaagaattcaacaatggcatatgttattacagatgttattctaagaattcaaccatggcatagagggtaaatcagatagcccttaacatactatataaccaagatagattagccaccagcactttaccttatgccttggaacagagctatgtttcccagcctcctttgcagttagatgtggccatagaactgagttccagccagaagaaaacgagtataagtgacatgtgcacttcccggcctgtctcataaaagttcacacataccatcctctttcatggtctttctcctgattcatctgagcctggcaaccttgggaatcacatgttgcaaataatggaaccacaggatggtagaattccaggtccctgaggcacccagtggctagggcaggctgcctccccacaaaaagcagaagcaagaaataaaaattcactgtgtcaatccaatgagatttggagactattttgtagaacagcaagattatcttagctaaaacagatgtcttccaatattattgatttattctaccatggtataaattattggaaaccaacaaatggttcttgctcaactttgtaataattaggtacagaataaacatgttagactcagtaggtattaagtgtatgcatagcgaatggaggggaataccaggagcaggaaactgtgaggcagaacactgtactagcaacaaattagatacaaatatatttatatttatgtcagaacaatttgaaacatattttcaaaattctccatagtgcttagcacaaactgtgaaagcacaaatgagatttttgtcaaaagatgcctgtggatattatgaacgtcttggggctcattcaaccaatatggaaaacttgagatactctttccaactcccttgcctgatagttttagtccataggggaaactgcttccttctgagttactgaaaatcgataccatgatttttatttctggtttccattgctctctttatgcttttcttactgggctgtgacctgatacactaaaatgaaatattgatagaaattgtgctcatgaagtttttccaaacagcaccagaaaaggaagtgccagaaatgtcagaagaaagcctattttcatgggatttcctgccttccttacatcccgacatgtctaaatagttcagataacctccagctgaactctaggttgctccactcagactgaaatcaaacagctgagttgagggccactcattcagcaatgggtgcaatttaggaactgcagtgataaagcagcgcaaccaaaagggacactggacacggaaattctggtcctggctccgtaggaactcatgccagctctcctgctctggcacccgatgcctggccttgagccaaccttctccttcagtgcatctcccagtgtttattcatgcctttcttttattcactgtttgttgctcacaattttttccaaaaagaaaatcttcctcaaagagaagccatcatttcccaataactgctttaagacagaaaaagtcaatgtttgtctcactcctcttatggccattacatctaccaaactcagaaatgccatctaggtgttaaaatcctggggacaataacactttcccagtcagagatctagctacttaaaaccaaatttttgaggttggtcatgtctttgggtgtgacatggcttttatttcctttgtcattgactttcatctataacatcaatgcattcctgagcacggtcttgtcactggtttaggttttaattccttttactttttgctgctttcctcctaaaagccttgtttctgctttttttttccctcccattgctaacgtacatactgtttagttagttatggcaaaactgtaaaaaattatttagtcatacagtttctcaactaacacactcattcttttttgttatgttttctttatcataatttatactcatcttatcaaaatgtagatgtaatgtatagaacctactactacctgaaattatctaagtgtgtaacatagaccctagtacttggactcactgatcagagtttggaatggcctctactcaggcagaaactccaaatactccaaataagctcacatgatggtctgttttaatatttgggtttttcttcttttttttttttccaagagcaggaaaagatgaggaatcctccagaaaaatacatggaagcatatgcatgaaacaaattcacccattataaagaagataaaaatattcacaaagaaaataaaaagattggcaaaatgttctaacaatccaaattcaaagaacacaacaatactaccaagtaccagcctgcaactttctgcgtagaattcctaatccctttcttctttcctttggaaaggcatgtttaagattatgaatactgtatatcaaagtcaggagtgaggaagggctttatgaagacacaccaccattacacacacactgtatgtgtctctgtccaagtggggatcatgcagaaaacagagcaaactatgattttcctcccctcatttctggtcctttctttcctcagctgttggggaagctggcagggaaattggtttaaggaatcaaagaaacgccactacgtacgtatgggaataaaactgcattcttatttgacatctggcatccaattttcttgtaggaacttgcaataggaattgaactttgagaaccacccacctcaaccactcctagtaccagtctccaggattcttgccctgacttggacatttgtgggatttatggttaagggagatcacttggccataaatccccggtgaggaatgatgatggtcctccctccctacccccaaaattaaaggcgcgagagcaggactccctgaagggaaacggccaccatttctgcgaggtctgcgcaaaccttaccatgtatgtgccaccgtgaaacgccgctgtttggggatgttgctgctgagaagcattctgcgcagaagcctgggggaatttctcggagagatcactggagagagcttgggagaaaccgatttcctcgctgtcttggacttctcatgctgcaacaggttttctcgcaaggatttcacaaggtcttcgttcagccacgggtttggacaatgcggattatccacttcaggtactgttaaagtgtccgggcttgtctgctgagccattttcctggtcaactttgtacagctggcaagaatccagggcaacgtggttccctcgctcacggtcccggaaatgtccagggaagcaggtctgagcctgctgctgttagtgcattcagtcgcctgcctcagtctctctgtagagcctggggctgggtgcagaggaggcgagcgcactcctccgcggaagcgtattaaacgtcacccctcctctcccaagcccctgccaaagatcactgacaagctcgcatagcaaatgaacaaggagggaaagcaccgcgctcgcacggctttgtccgtgctacaaagcagcctgttaaactattggaactaatgcgccgcagctgcgcgagtgacttctgctgcttatgtacataaaaagtcctggggggagggcttaaccatcagatgcctgctgctgggttgtttggctagtctttccatttgcttattcctgaatccaaaggaaagaaaaactttgaacttgaccttcctctcccgcagggctatttatctccctacagtccacgttcataaaagaaaaatgccaatcctttgtttttttctctcttttttttttaataagggaagaataaacaagcactagctacacaaggagaaatacttccctgcttactaaactcaatctgatgaaccacataagacaaatcccatgagaatgaaattgactttttctccctctgtctctagttagaacccaaacaaacaaaaggtttcaaaatactacacatggaacgctttacaggttgcagttgtgttctacaaccttattaattagggccctttcaaagaactaacaacactatttagactcacaaatgatatgttttctctttgcatttaaactaatgcccctccagaaggacagatagttttcataagagtagtttcaattactatttgtgatatatacaattttatgtattcaactataagagggtggaatacatctagcttttcgtgatttcctttattgccttttaatgtaagatttttatgtgtgatgaatagagcttcaacaaacttattcagagagcttaaaagaaataattttgcaattggaaaaaaagtaaaaatgttgtaacaagaaagtatgaagtaaagcctgttaaatctcatttatgtggacactagaagtgcagacattaaacagcattggaaagaaactcaaacctttgcatagggaagttcccagtagcttagtgatgctacagaccatgtgggattgaaatcaaatcacatctctaacgatctaggaatattttatgtttcttaaaaacccaataacttagggagctacaaaatgcatccagaaaaaaaaaaatggagactggaatgattctttttgtttcctatgattactattaggtcaattttaaaagtttattctgtttccctgcccccctggttgctccattttaagttccaattccttgtcttttaaatgtttacagaaaagtgtactctgaggttctattcacagaaggacagggtcaaccacttggtccatctttcctgttagcatgcccacaacaattcaatgacacataagtgctatgacttcatcaaaaaatgttagacaaatatttgaatttgaagaatcaggatatgattattcttattctcataatttttaccaatataaaagtttttgtcactttacatcattaagtggcaaggtatgtgtgtgcatgtgtgtgtgtattgtctatatatatactatatttctatacagtgggctgagggactgaacggccttagaagttgtgcaaaacaggtgtgcaatgcttgccctcaaggagcttgtaacttaatggaaaggattggacaatacttagaaaaacataccagaacaactggaaaatgaaatagtcagatgcagaaaagtacaatgaaaatgaaatgcgtatatgatgagaaaactctgggtaaagtttaagaagggaaggttcagaaattaatggaaagaaagaaaagaaagaagtgcactttacgagtaaaaactagaatgaacaaatgcaattaaaaatgtatttgtacatgtttttagttttgtgcaaaacaaaacaaaacaaacgacaacaaaattaaaggctcagcagtctgtagacacaaagcctgttcaggttcaaagaaataaaaaattcagatgataggataagtgagaaaaactaatatgtattaaactgaaatggcaaaaaaaaatattttagaaaaaatctctagtttctgaagactcagttccattcaacaaacatttatgggcatttattttttgccagacactataatgggtgctctaggatatttaaagattagcttggccaggtgtggtggctcacacctgtaatctcatcactttgggaggccaatgcaggaagatcacttgagctcaggaattcaagactagcctgggtaacatagcaagaccccgtctctataaaacattaaaaaatagctgagtgtggtggcatgcgtctgcagtcccaggctactcaggaggctgagatgggaggattgcttgagcctgggaggttgaggcagcattgagccatgatcatgccactgcactccagactgcatgacagagcgagacccagcctcaaaataaataaataaataaataaataaataaataaaaaggttagcttgatactatgtctctatatctgcccttggggagcttatagcctaataggatagatgacaagtgcaaaatgattgacatgaaaaagtgcagcccaagtacccagacgagatcttggaggctggagatatttaaatgtctggctctaagtagagaaaagtgattcttagtgaccaagtaaaggaagagattatactaaaaatgatatgggcgacagagcgagactccatctcaaaaagaaggaaagaaagaaaaagaaaaagaaagaaagaaagaaagaaagaaagaaagaaagaaagaaagaaagaaagagagagagagagagaagaaagaaagaaagaaagaaagaaagaaagaaagaaagaaagaaagaaagaaaagaaagaatgatatgggcaataatagggaaattcattgaatgcaagggactctgggttctagttcttgcttttagccaccttgtagaagagcttacaaagagtaaactatttacatgctgatcttctcacaaatagtatgccatgtagaatgttcagagagtctgggcactttgttaatgatcacaattaagctaaatagtagatataacaatattctattcaaaatgcattgatcattatggttaaacatggacaaaagcattctgcagatctcccattgctttggtgtatgttaaaggatttcagtgtatttggttggtgcaaaagtaattacagtttttgccattaaaagtaatgaagcaggattgagagtttctttacaggtccccatatcccattattattattgattcaatttcctaatgcttactgttaacctcctaaatctgccaaatgatacatgatatgcatactgctttttaaaaatacaaaattaattttgttttgagaattcttggccagtccttgaaataacttgaaaaagcctgcagtgtttcaaagtcatgcttgaaaattgctgccttaggaaacacaaattgtaagattctgaagataaccaaaggtgggtgaggtttggacagactggcaattttttcttatgttaaggcagagggtcagagggtgctcttccaacaggagcactccacagcttgtgtttttcacaaaatctctttaaaattagctgccaggaacttgtctgaaaaacactgtacagtaagtgacagccaaataaggcctcaggttttaacaagtggaaatttgaaagtgggcgaaatgttttgataaagtcacccacgcctagaacagcagataacatctcttaacttcatgaaagttttcctagatacctctttgtggattttcaaaatttgtgggattttttagattatttggaatccttgaaaatgttttgtctcattaatcatttataggtggtaacaaggaagatgagattttcacaggttctgacacaaaaagtgtgcttttgtctaggtacaaacaagcaaggctagatttcccacaatggaaagagagcaatgatgtggctaattcaaaaggatggaagaaatgatttatactcagctatggaaaacattgtatgtttctccaaactatgttctaattagataaacaagggttaaaaggaaatcgctttcaaattgtccacaggatataggccatggaaatgacctgatagtgggagaggttatgttgtctactggataagaaggtatgggttaattttagaaatgaaaagtttattttgaaccccagaagtactagttactagttgtgttactttacttttcagtggctcagttccagatctgtgaaataggacgataataatgaggatgatgatgatagtagctattgcaaaagaatgctacaaggattaaatgtgttaatccccatgatataagtgtttaggagagtgcctggtacagaataaccacccagtaaataaaaatctaccattatgtgatatgaggaacttagagaaattcacacttagtagatatcaattatgtaccaggaactttgcattttatttcccttaatccttgcaatcatacttagggtgttgctttcgtactacaattttagagatgagggcataaggaggttaaataacttgccagaggtcatatagtttaccaatggcataaatgggatttaaatctgtgtctatgaggtgccagagcctctattttgactctacattatacaaacccaaaaggaaagcagatctagtatttaaaattgtttatggttatttctatggaaaacagtagacacctgggtcccctgagttcttgatctagttaacactaaattttgcccttggctattctcagcatatacactgagtcaacctgtaaacctgccaagtcatgaagttctttctgaggcatggtattgaagtaagggcagctgaaggtggaattcctgagatgttttttgtttttatgtttttttctcctctatatacctgtcttctttcaatatgaagaaattttaattaaactccatgatagttttccacttagccaaataatatattctaaaattattttatcttaaattttcatcatgattatttttcattataaagtttgatgataaagttatatcatccccttatctaaaagcacatctgaacactgtagaacatggtttttcaaatcatcatcatcattgaccttttattaggtactgggctagtaggcagagatttccaaaaaagtaaaatatctactttagaagggaatataaataaaactcccaacaaagaaaataaatactaagaatcaaattaataatagaaatgattggtgccttctgggttaaaaggagtgaccaataatttatctagacagagaataactcaaaaacaaggcagggcttgaattaagtcttgaaagaaggtacatatggaggaataatgagaggtttggagagataggtagtttaggggaggtaagatgcattggatttttagactttttactatggaaaaatcagtaacatttacgtggtaggtgggtaaacaatatataaagagatttaaataagtttaacctggttttaatatgttctataatttgcaagaggaggattctaaagatcttatttcaatatttcctattcaatatgaatttgtgtagaaatggaaagagagtacaagacttagaaaagtttgttcattggctgtatataagcttggaagtcaatagagaagtcaaaaattcatcagatatttcttatacattccacccaattaaacatcaaaagccagtaaacagtttttttaagagtttctagatttcattgaacaaaacaaatatatgtcttgatttacatgacagctatattttgagcatatgatgtgctcttctaagatcaattcattttaataaaaagaccaaatctagttatatggggtttttttcctagattaaaactaaatgttagagtgatctctgctgaaatagtaagtcattatttcacttgaaagaaacgttaacattttatagggcacaacttacaatggcattttttttttcttttttcttttttttttttttctgagacacagtccggctttgttgtccaggctggagtgcagtggtgccatctcagctcactgcaacctccaccttctgggttcaagtgattctcctgcctcagcctcctgagtagtgagtagctgggattacaggcaccaaccaccatgccgggctaattttcgtgtttttagtagagacagggtttcaccacattggtcagacttgtctcaaactcctgacctcaagtgatcctcccacctcggcctaccaaagtgctgggattacaggtatgagccactgtgcctggcctataccagcaattttaacacagcatgtttattttatttcagagaaaagttgcaatacaatttaggtaagaaccttccctttcctcctaatatagtcattctaaaaattctaagggaaattacttctaattattttgctaaaaggaaaccccagaatgccctctctaaatattactctgacttcaaagaagaaaataagttttgatagccactaaatgtttaacatattataataccctatatttctgggttttatttcagtgagaggaataaccaaacattttgtctgcaacttgtcaacaacaacaacaacaaaaatcccatatctcaatctgtactagatcatcccttagcctattgaattactgagaaaaaaataactagatgtaagtgcaaaacactagtgcactaagcataagcactttgcattattacatgttttgatcattacaatcattctaacaaggtggttactattacccacattttaaatctgagaaaactgacatacaaaaaaaaaattaaataacttcctcgaagtcatccacaccaaatgatctctaatcctcaaggtcataatcaaaagattttcaaactccccaaaattgttcattgtattacaaacaccagacatttagtgcacgaaagatcttgggtggaccttcagaatccttgtgcataatgaaattgacaagaagaaacaaacgtttgttgtctttgtccacataacagacatgataaggaacaaaatccaacaggtatcctaaattcagaggaatataacacaatagtgatctattcaaaactcaacaccaaggaacacatttccttatctttctctttcatttgctatacccacccctgaccggcccccaagaaaggatttttttggaatctttctcaaattagtataatataactggataacttccctctaatccccatacataacatctgttccagtcattctgttttttgaatatggtttctatgagacagtgtatttcactgaacatgtctataattcatagattttaattatagttggaaattttttctaaagttaaacatatctaaacaatggtttctcataaggaaatcatattttcagaaataacattttttcatacctaactataaggaatcttctgaaacctagatttttatctgggatgctttacaaaaggcattagggaaaccagagttgtattccccattttgtaataagttagcaaagtcaccttcaacaagttcattaaacttctctggaactcactttcccagtatgaagtcatataacttaactaaggtttaataacttaaaaaaaatcttatcctagtgttgaattgggagtttcatttgtcatttaaggaaaacaaatatcaagtgcatcctgagccaatatagtctcttccactttcatgcggtgttattatataccacaaatgcttttagaagaaaaatgaaaaacaagatattcaatgtttaggaaattgaagatggaaaacaagagagtgctacaataaataggtgctttactgatgcttttatggctctgaaacttgggaaacttttttccctaactaggtaaaaaatttgttctgatatctgagtcacagcttgggagatggagtgggagagcaatgcctaagttaatttaatatttgaaatcaaagcattgttttacttctaaaatagtgaaactacacagataggtatattcactgttacataataagtcaaattttctaaaacatcagggcttaagttaccttttagacaatttcagaggaacctctccactcacatttcacaaagcatgtctcaccgaagatgagttttgcctaattttaatgaatgtttcacgaaaaaaaaaaaagcattttgtgatttaaaaaatatatggagctgggttgaatacaactaaatggggctcctcagagtaagagctctccgtcttttaatatgttaatgtgatttgtgaatgtagactcgcctggctctaaatccacctgcatcctccagcatgtccagagattaatgtttccaggaacccttaactcgactttccacaaacatctccttgaacatagctgatagataatgcaaaccttcctgattttctggagtgcgttcttttttctttttgttgaactgcagccaaacggaatgcttccagcagaatgatgacttagttcgggtactggctgccctggtaacagcctccattagaatcaggttattgttatggtcctgctctcaggctaatttcaccctcctctgcaattggtgtatctccaaatgtaaaagacataaccttagcaaagactatgagagggatggggccatgcctctaaataacagctttgtggacagaagcctgttgggagactatggacaaactaacaggacagaaaaatattggactagatggtactgttggtaagaagatgtataaaggcaactgaaggccagacaggtgctcttcaaacattgatggacctacaaatcacctggagaccatgctaacataaagattctgattcagtacatctggggtgaggctcgagctcctgaatttccaaagctcccatgggatgctattgcctgtccatagattgctccatatgtatcttggccttagattatgtaggtattgatggctaatgaatacagcaaaagaaggcaattaacttggacacaggtgatcctatttctttatattcaggcatttgtgtaatgtttaaattcactgctgatattataataaatcatgcaatttctaaaataacttatataacagtattacataacaaaatcataaaccatttttttcaaaagcgcatatacactctaaaagattccattctagaagcaaactttgctatattaaatccacactttttagatgagacaaaaaaaagaagttgaaataaactcttttgcaggtgttgtgaatatctatgtctgttaataaattataaattaaaagtaataattacataattgaaaggtaaactttaagacttatagactgttttctgaatgtaatttatttaattattctacaagcatttaataagacacaccatgtgctaggttctgtgggtccagtgaagacatggtctttgtgtatctggggatacaagattcattctttgctacactcacagtctcctgggactttcagtctagtctactgtgcagtatgaaacatgcgaaggacacttaccatcaagattcactaccacactattgacctattatctaaagaattaagaaagtatgcatccgccaactcaatacctagccttatagtcaatctatggataactgtaaaagcaggtatatgcttttctttctggggcttcccaagaagttattctgacctggaagagctcaaatggttgctaaattatgaaaatcaatttgaatttctttctgaaattattattttaagctgtagtaaaatacatatgaatattacaccaatattataaaggcatatattctagttaggctaataaccaccatttatatcctgtaattatataaacattgcataagccaactagtaattatttaatcaatcagttataagggaaatcaacctatgacaaagaaatcctcttgatacacccctggtgaaaacacttcagtctaaacagcagttgcctcatgattcttgtactttaaatgctgggaatatagtaagtgttcaatagacactagacacaggtagaaaaggaaggaggaaatgattttgccgtttgttttactattttttatgcttttagatagttaacaggctaaaaaggtagggtgttcaaatcaatttatactgatctatctactaaaattctacattgttttagaaatccttttgctaggccagtgcagtggctcacacttgtaatcccagcactttgggaggccaagttgggccaatcacctgaggtcaggaatttgagaccaaactggccaacacaatgaaaaccgtttctattaaaatacaaaaattagctgggcatggtggcacatgctgtaatcccagctatttgggaggctgaggcatgagaatctcttggacctaggaggcggaggttgcagtgagccgagattgcaccgctgcactccagcctgggcaacagagcaagactctgtctcggaaaaaaaaaaaagaaagaaatcctttggctaggcatgcttttcattttaacaatgtatttgttttaaattagctagataatatatgatgtattctcattgtaaaaatgttaaaagttctgcagaactctaaagtttctgtagccctccatccccaaactcaaccttcccccaggtaactctgttaccagttgtgtttgttcttctagatctgcactctccattacactggccaccattcaaatgttgctattaggacgtgaaatgaggctcgtagaaatgagacatgaaatttttatttttatttaattttattaatttaaacttaaatagcatcatgtggctagtggctaccatagaggacaataaattctatagacctccgtgtgatatcataaataattttatgcctataggatcatatattactgttttctgaggcttcttaaaaacatagtgttatatttaatgatcaatcagcaatttattttttcactcaacaaagatctcttgctatttttagctgatgcatagtattcaatagtatggttatttcatatttcatttagccatttccctactggagggcattcagatttccaccttttgacaattacaaagaacattcttgcaaaacgcattgggaatacatgccaagtattttttttaataatagatacttagaagtaggattaactgataagatatcagcatttttaaattttaatagaaactgccaaattgttctccaaagtagattattcaatttacactcccaccaacagtctttgagatcccacgttttttcctcaaacagccttatgttgtcatcaatttccctgtactagttgtcaatgccttttttccctcgagaataccttctatttcttaggcagaagaaattaagaagagcgtcagtgagccgggcgcggtggctcacgcctgtaatcccagcactttgggaggccaaggcaggtcgattacctgaggtcaggagttcaagaccagcctggccaacatggcgaaaccccgtctctactaaaaatattaaaaaattagctgggcatggtggcaggcacctgtaatcctagctactcaggaggctgaggcaggagaattgcttgaacccaggaggcagaagttgcagtgagctgagatctcaccactgcactccatcctggaaatgggaagatgtatttcacattgcttctgagtcaatgttcaattttagctctttaacaattttagttgaccaagcatttcccaggagtctctctaatatgacaatgcctacacattatagaagggttttgagaaggaaaaagcattaactttctttttcggtaattttctggcactactcagtaaaatatgttttaaattgcttttcctataataaagatagattgtgctaagcatgtattctttgtgcctagtccctcttttacacatcagtgtagaatttgtaatgcctggtcaggactctattgctagtttgtgtaactttttccttgagcaaaatcaatggtctatagataaggcctcagctgtaaacttactgaattctggcctgacagcagtgttgctgcagcatccttagataagtagttttatgtgaatgaaagaacaggagtatagttttgattaagtcatatttgtcctggagcctgaggcgagccaaccactctctagggctcagtttccttatctaaaagcgatggtgagctgagcgcagtggctcatgcctgtaatcccagcactttgggaggctgaggagggtggatcacctgaggtcaggagttcgagaccagcctgactaacgtggtgaaaccctgtctctactaaaaatgcaaaattagccacatgtgctggcaggtgcctgtaatcccagctactcaggatgctgaggcaggagaatcgcttgaacctgggaggcagaggttatggtgagcggaggtcacaccactgcactccagcctgggtgacaagagttaaactccttctcaaaaaaaaaaaaaaaaaaaaagacggtgatagaacagaagaccacaaaggtaatcaaaccaaagttgtaattgaaaaaggagtgtaattcctacatgattggtttatgtaggaactatgtcttacttagtggttaagtaagacaaaagtgaaacaataaaaatgtatgttggaacaaggcaatttctttgctgcatctggaaagtctagaagactgtttcccccagattttttgtgctacttacaatttaatggttgcagacatgatgtacaactttaataacattttcttaatcagtttgtagacagtcaacaccattaaacaaaaaatcaattcctgggccgagcgcagtggctcatgcttgtaatcccagcactttgggaggccaaggcaggtggattacgaggtcaggaattcaaaaccagcctggccaagatgatgaaacctcatctctactaaaaatgcaaatattagccaggcatggtggcgggcaactgtaatcccagctactcaggaggccgaggcagagaatcgcttgaatccaggaggcggaggttgcagtgagccgagatcgcaccactgcactccagcctgggcgacagagcgacactccatctcaaaaaaaaaaaaaaaaaaaaaaaaaaaaaaatcaactcctgatttgtggcgtatgctgatttccatttccattgtataaatacctggactaaagctgattttaagctaccaacgttatatcagcctatgtggagttgggaataacatgtcattttatacagtgtttccatcatacagatgcaataaacaaatgacctcacaaacagaaataacagaatgtagtaaaacacttaggaagggatgagagttttgagtatgtgttatgtttttcagataacttgaagtttacataattaaactttagataattgatgcattaacaatttgcttagcaaatttctggacatttaaaaataggttcctgtgagtcagttcagaccaactctaaaatactgctgctttttcaccatatagacatcctcgagtctgaaaaacctgttcctttgtgattttctaagaactatgttgttttgattgatttttagaagttctttatagtttctagatgtgaggccttttcagatacaagtattgctaatatcttaggcttagtacccactttttaaacgggaacttgacaaatctgggattttagtgtagcacgtaagtgttcaatacatgtttggttaaataattccccgtaaaagatactgacatggagagattacatgagcccctggatacttaagccatatattacttttatatggaaccatttcagagaaggaagtctctcattttgtcttaatagcatgtttcactatctcacaggcccataaatagcctactccagtgattaccaccttttctggagttgcaagaccaggaagatcagaatcacagacttttgagattataaaggaatttaaagtcctaatggtcctgtccaccttactagtatacattacatatgatacccagcagcatcctttctgccaaagtaatacagtttatgcattcatttaagaaatagtaaatgataagcaattttgctataacaactcatgagaattttatgactgtatttggagacttgtgggaataaagaccagcaatgaaagacaaggaaatgtaaatccaatttatgtaatagaatatgatgacccaacatctcctttttgctctgtgggtttatattggccccccttcacccatgctttggactttaccatttccttctcttcctcctccaacttccctttgcatcctggccccttccaaactatgtgagtatggatgtgttaatgtattactccatccaaaggactataactcatattacccaggagattctagaaacaatgtctgaacacatcacagaaactaaaatgaggagaagctcaggcactagcagaaggcctggttttggtattcttccatctacagctgtacagctgcattcttaaccttggctgcatattagaatcacccggagaattttataaatttcagtgcctgggccacaccaccccagaccagataaataagaatctctcagggtgtgacccaggcatcagtttttttgtaaaactcctcaagttattcccatgtgtagtcaagatttggagccatcccaggttgaggtgtattgatataaaccagcatccacatctataaattaaggccatttattttacacagtcttgaataaaaaatgagcatctgtcttccactactgtgaggaagcacagtcccttaaagtaatggtaggtaataattctttccttctctgggctacataatcttggctcttctctcatgctttcactctcttaaacttccttcctcaggctcctgtaccaatcttcaattcacttgggatgtcctagtctaaaacatttatttcatttgaaaggaaaaatatcaatttctatctaaattggagtaagattccattcagatgtgtttatttacaaaacataagttgttatttatctgtgtttaattgatcctggaacattccatgtaaagaacattccatgtaaagaaccaggcaacttggccaggcatggtggctcacacctgtaaccccagcactttgggaggccaaggcaggtgaattggttgagaccaggagttcaagaccagcctgggcaatatggcgaaaccctatctctacaaaaaattagtgggtatggtggtgtgcacctgtggtcttagctatttgggaggctgaggtgggaagatggtttcagcctggaaggtcaaggctgcagtgagttggtaattgggccactgcactccatcctgagtgacagagtgagacaatctcaaaaataaaaaaataaaaataaaaccagccaacttgtctgagctcacaaaggttttaggactcatctgtgtaagagagaagtcactgcatatcaggaaacaggatgaggagttccctcccataacccacagctctccaagagaacaaagaggtacatgtctctgattcccaaaagtaacttcctttttttttttttaaaaaaaaaaaggggattgtgcttttcaaatttatggatgtaaataaaagacctcaggaattcatggattaggagcaaaagattaaagtcagtacaaatgatattctaaataggcagaatgggttcaaattcctctcaattctttctgattgaatgaaaagtaaagaataaaatctctggcagaagaatataatgaagggcatggtgtggaacaggttgaaacctgcatttctcaaatccgtattgtataaaccaggcattaccttttgtatttgttaagctaatttgttttaatattagtattgaaaacatgtttgggttgctattaacataggaattaggcagtattttggagagcctcttttgagggaacaaatgtacaatcagtcattaaaaatgtaaaagaaaatacaaattatagttttctagcaataaattgatatcaagcctgttttaaaatgggtgatgtggtttggctgtgtccccacccaaatctcatcttgaactgtagctctcatgattcccatgtgttgtgggagggacctggtgggagataattgaatcatgggggcaattttccccatactgttctcatggtagtgaataagtctcacaagatctgatggctttataaggggaaacccctttttcatggtttttctctcattttctctcatgtctgccaccatgtaagacatgccttttgccttccaccatgattgtgaggcctccccagtcacgtggaactgtaagtcccttaaacctgtttttctttataaattacccagtcttgagtatgtctttatcagcaatgtgagaatgaactaatacaatgggcaaatatttaggaaaattttactcaatacaaagaaatcctggcctcaaaactgacatgatttttacatatacaatatcatgtacaaatagtttataacttaatccacattctcttctttcataagcatataagaagaatacaagcatacctgtggtatgggaaatggaaagactacttactattcccaattttgagtaaacctagctttcatttgtgattataagaaatgtttttcctagtaaaattctgaccataatatttctaaaaattaacacttcattcattgattcactaactcattcatacagctaacgtttattgagcacctactaggttctaagaatgtattagtggaaaaagcacaaagatatatagatctggatcactgacctctcctactactcagaaaggaatctgacccattatgtaacagccaagaatggtgagctactgaaacactctttcacctcttggtatttcagaggatgaatatgaggaagaggatgctatgtacatgattagtggacagacaggtggctgttttaagaaccacctctagacaaaataatttgcaatagctctgataagaaagatgtcaacacaattagcttttgcatgcattttaaaaattttggtatggactttccagtgaaggttttgtaaactgatatctcatccataccgaaggatggtaccatgtttttgccggtggtactctaatgttcaaatttgtgaagtaaagtatgtggtttacttgtgatgcaactcctgcatttgttgccaatggcaatggttgttttcttcattaggtttcatatggttggtcaggttatgtcatgagaattgtattgagaaaaattatgagtttgttgagtgccagctctctgcagtgagaatggttggggggtgagggtggggggaactggcagtgtttcttctggtaggtgaacagaaatgcagactcgtgggcactctacacaagcctttccacatcaactggcctcccctctccccatccccggcatctattttctagcctttagaaaattgcatacatgtgtctggaaagttccatcgatcagctctttctgcagcactccacatttctgtggcttcagaaaaccttgaattgtaatctccctcttctctcaggatgcatcactgagaaaaacttaaatcaactataattttcaacagattctaaacagggatttagaaagataaggtggttactgaattgaattaaaataaattcaggctgtagtccaattgcttccagctcttcccctccctctgtgggctaacaagtgtttccaaagccatagggcattaagaatcctgaaacagctaattaacagggctgctctacatcacatgaagcatgtgggttccaggcagctgtaaaacctcagcttcctgaggctatccgagtgatgatgaagcacttggaattggatcttgacattctgctacctgcctgtggcagaaaataacctttttaacagggactttaggcgaggatagtactttgggcacaaaaaagtctcattgccatgactatgaaaaagtacatgaacatttcctcatgttcagactgtgactcatgactggcctgttaacggacagaggaagcctcaggcgttctcttgacacatcgtccaaccaagtgaaatacgggattggtgagatgctttttcatagctttgaatcaagtatcttccaaaaggcagataaaaccaagataaaagaggtcattgatgccctttttcaacatttttttttccacctatctaaagatttcgccaggagaaatagagggctagcctactatatttcacagggaaataaacaaaagcgataataaaaacttagcattttttcaaaaacattggacatgttgacatgaattggtctcatctcacatagatctgagtataaattatgtgctttattaataaaatattctgtcacactgacaatgtcttatctcttgcctccagcctataatccatttcccataacgttataacaaaagtctttctaaaacgtgtcattcctctacttgaataaccttgatttcttcctctatttcatggtagataatctgcacatttcttatgcgccttataccaaggctttcactaccggattcacagctctgtaacttcgtctcaggggactggggagaatattctggagctacagaaatttagttgccgacatgccatgtccatttaaacctattaccacatcttcccattcactttctttctgctgagttcttcgttttatcttaaggtgctgattcaatgtcacttgctttgggaatactttcttcacctctcaaacagaaggaatcacaccctttgtcacttgtattcactactctatcacccatacacatgggtaggtctgtgacttacctttttgtcccagatgtctttattatcatctgtaatatacagaaggaaggtgataaatgacttgctgaaggatagatggacagataaatggatggaattagatcattgaactatacctaaaagctcttataattctatatttttatgatttatttttaatgaggagcttttgaagtgattactagaaaatataccaattagcgaccacaattaatattcagtgacatttaaaatttcaagtgagattttaattcactccttgaatttgtatgtcttttatataggcatctcactacaacgaccttagaggtggcataaactgaaatataaaagctgggtctatcaagcaactaaaatctgatttgatggttaaaaggtaagagacacatcttaaaaatgcatatgtaaagccaaaagctgggaatgatgctaatatattgagtgacatataagcatagaaaatcatccacagatgctaacagtaggctgaattaaaagtataataggaacaaggtaaagcacaacatttacttaaaataacaagctatgtataaaacccaacattctcagcaatagaaaaatgaaaaaaatgcattctagtatggtgtatctctataagatagacatcatggaagactttaaaatgatggctttgatgaagtttaacatgtttaatgatttcataaaaatgttcatggtacagtgtcatttcaaagaaaaaaaagagacaaggtttgaaaaggtctagttaaagactatttgcaggggatttagtgacctctttggagagagctccttgtactgaagaaggagctgggcacatagagctgagcccaataacaaaaccttggctgtctgaaggaaggaggcattctaaatggaatatggcagctgcacttgaatgcttttccagggatgaatctctggatcctgggagaagcagagagcttttaagtaaagagatgttgcatataattccgtacagtatcaggaacaaagtgagaaattttaacatccattggagcagctacaaagccaaagcatggccttgtgatagctgcttgactccctgggtaacaatgagacctaataagccttggggagtccagagagctgctggttctggtggaagagcagtggttccaagaagggggatgtgttcctgtgggacacatttagaactcccagaaataatgaaatagattgtgtagaagaattgcttcagcaaatgtgggaaaaaactaatgaaatttaaattattatagttaatgtaacctcccttgttgcattaggctagaaagtcctggcaaaatttaaagattcccttacatagctatagaataggaaaaattagaaagttcacttatcaaaagcttgttataggtagtgatatgggctttacaaaaagaaaataaagtaaaaaatactcaataatgcaaaatccaaaataaacacaatgtaatcatagacctctttaacttcaacagtacaatactgtttcacagcaaacaatcacttcactgttacctgagcttggttaggatttgcctgaagtagacagccacgcgttttataggaacagagatactgatgaattcagaaatattttatgagagaagcgtctcccaaactgggaagcctcacctaagaaatatgctcagatgggcatgacagttgtttcaagtggtgaagaccatttccaggaagaaaattcacaaaaactttttgttcagaattaagaacaaaaaatgtgcaatacagagaagcaggctcacagctcagtataaaggctggtttctaaaaggccagagctgtctcatgacagatcaagctgcctggaaaggcaatatgcgttatgtcatctatgttcccaggaagaagctaccagacatgtgctcaaggcaagtcaagttctgtgccagagaagtgatgagcctgcgtgatgtctacattccttccagtgctaagattcaagatcctcagatttgtgtctggggaaaaacagtattacttggaatgattgtaattttcttggctatattgaagtcatacagtatatttaattagtcattatattcccagctttatacaggtatgaatctattcctcatgggagtgaaaactatgccctgaatgcatataaatggcattttaatctaagataaaatagaaatccttgatttagttccattagttctaggtctctgaaggtcttcatatttaatggctggcatctttacttgctccttcagggttctgcaaaacaggagtttggggtcagcgttcttctaggagtagagtcaggtcctgattcgatttcatccagaaccaaagttatgttgctctgattttagagtacacagagctatagcactgaagataattttgagccttataagctaatgtgatatttctttcagtgtgatcaatggaagttgaaaagcaggaagagttctttctgtacgtttctgcacttggtgggagtgtcattggagagagtttggggagggaggaactgacaccattcctgtctactttatgccaaacctgtgacagagacacacagagcctggagagctactggagtacctctatctgtagacgaggaaacaggagcttacaggggacagtagtttagtgacatgtagagcccaggttaaaacacagctctgtcaaatcaaaccttgtctactttcaaacaactgaacacagcaaaataattacatgagtgtttttaaatgttgtatttcagttattgaaaaaagaagccactcactcttattttggaattattaaagtagcccagaatcaagatttaagtggaaatatttaagaccaaaggcacatttttttcttaccttcaaaatatttcgggcttcatgtgaaactaaagcctttaataagttgacctcaaagattgaaaagaaaagcagataagcaatttcccggtaaagaaagattgctacaaaatcgctgtagactgtatggaaatttcaaagggtagtgaaaatgtgctctgatgcccaaagtgaataacaggatgtgtgactaaagctgttgacctacgaccagctaactcacctcagaacctacggagctgctgacgttacttctcattttctttctctttccccttcctctctttgtccttatttttgattccaccctctgcctccattctgcttcctcctcttcaatgctttctgtcatcccgtcttccttctttattgtttctctaattgagcctaatatgcaattcattgtgaaattaacatgaccctaatatgaaaatgtgttatagatcacgaaaaacttcctgtctactactatgtgtcctgttaaacccaggttgctgcaatctgtttctttctctgataataattttgctttcattgtgctcagcgtgggttcttctgagctcactccaccctcgccctgggatgtgtgcccatgtggtgagcacagggaggtgggagtgcactgttaattctcttcctaagaaagagaatgcgccttgtccctgtctgaggaagacttccgagtacacagactcagagtcctgacagtacgtccagcatcacagaaaaatctgccatggcattttatattcctaattgttcctaatgtcaacagaataacatccaagagaattcacataaatctcctgttgagaaatttactgttacaggagcttaatacttcgtaatgcatgtacagcctaaatatgttgtccttggatggagaacacattacttattaaaagccaggagaacaaacactctacttgatcttagccaaaggctaaaaagctatgaatataatggtgggagttcacggcgctgagagcaacacaaaaccactttagagaacctgcactgtgaattctggttcttctcagctgatggcattgcatgctttctttaacctcatgattctgtgttttagaatgaagacattgtgctgctaaccctcataaaagcagggtaaatgatggagaggccaagcacaccctcaactcgtattgacagaattatccctcaaactcccagagttatttgacattattaacatggtctgtagtattcattttatttattctttcaaaaatatttgtagagtaccttctcaattacagtcagtcacaagaccgggccctgtaagggttaaaaataaatactgaaatataagcaatatgaaataaattcctgcttctaaagttacaggtctaggagggagcagacagccccgggcttagaatcctaagacttgattcaagtgctgcttctgccactcactctctgagtgaccttaggcaactcacttacacctctgtctctcactttctctcctcataaatcacagattatatccagctcctgggatgttatgagacaaaacgagagaatgtgtgagaaactgccctgggtactctgactacacaaaaataatgcactgcaactaaagtattttcaaagtctagtataggatacaatgtgtggctccgaaacacaataagtgaaaatagaagagggaccttaaacaagcaaatggtgactttactaaagcagtgacaacagaactcagttctatgggctcagagaagagataaatccatgagtagtaagggtataaagggcttccctggggaggaaacgtggcacagaaacggaactaagattaattaaggatgggcaataggatggtaggcattattcccattgtactcatgtggaagctaaggcttggaaatatttcataacaagtctgaggccacagtagaaccaatacgtggcaacgcctacatttaaaaccagtttacttttattttttttcatttcaaattccgggcacttaaaatactagcaaccaactttgaggctccaagaagctgtgtgtgtgtgtgtgtgtgtgtgtgtgtgtgtgtgttttgaggaagtgggcatggagtgaaggaggaaagtaagaacaccacatggaaaaagcactaacaagggtggccaatgcaacaatgcatgtgatgtatttgggggattatggatggaaaatccagctggcatagaggtttgtgccgtgaaggagaagaacgcaaggtggtaaaagcatgctgagaataagtgaatatgcaaaggagtttggacattttccactacaaaataaggcctctttggaaatcttcaaacagaggagtgatctaatccaggtggttttaagaagatgggtttggcatcatgtaaactaattgactggggaagaaacagaacaaaaaggcccttgatctgcagagatatggctctggcttagggtagaagagacagaaggacaggaactggtatgaagggagatttgagaaaagagtgactgattggaattggaattggagctgaaggtggctgtgttaaaaaatgactgtaggcttcaagcttaggtggcagaaagaatgatcatgacattcacagaagtggggaagtcaggaggatgctgatatgcagggaagaagagtcagcttacacccattgagttcagtggcaagacagtcaaatggaatgtccgataggtaggaaatcagagcaagactagcaatctgactgcagactcaggagtccccgaggagcctgagtgagttccgtggaggtgcatgatttccatgggagcaacacactcagaggcagaatgactcaggaaccacgtcctgggagatgtccagcgtccagctgtgaataccacaaacttttgtctatagtgatgatgaaatattgactctggaattttggattttgtgccttaagggaagcttgcaaacggtggccaagcacctagagagagaactagtcatatgatttgtttatttcatgcctgctgaataattgtttagttaataaatgtccttatgtaaatcagaatttaatctaagatgcttttattctaattaggtggtgacattataaggaagtagttaactcctctcacctccaacttcactggcagttaccaatgtccaaccaaaacaaccaaaatgtgttcataataatattggtttaggtcagttgccaaaacagttgaacatgaacatctagccttttaaaggatgaagattcattcataatggttcaaccaaaaagaaaagaatggttttagaaatgttttccaggcacatttaatgcaaaggaaagctctagtaaaacaattatctgcttgacttgttcatttcacgtggatggggattagaccttctgatcaacacctgcctattcaacatttatctatatatgaaatggcttttttaatgtaagaattttttccccttaggggctcatagattaagccgtggtgacagagagcaattgcatttttaagtgttactacttaggtataaatggtgatcatctgatttaatccctatcccagtgggccatcatgaaaatacagctcatatatacagctcctgtggcgtgcaggacgttaccatgtggtatttgccaatatgggacattgcactcatgtgtatacacacacatgcacagacacacatgcacaggcacatgcacacacacagatgcacatacagacatggacacagacatacacacagacatggacagatacacagacacacacacagaggcgcacacacacacacacacacacacacacacacacacacacacacagacaactctagctatctctgaggtaattcaacaagccctgcagttggcttcatctttatattcagaacttgtttttttatctttcctttgaagagtaatcctatctgagacagaaagaagatgagtcacactgaggcaaaactttgtaggtagaaatgtgcataaatgcgcttctctaagatgctcatgaagaaaagacaaaagaacagccatgtcgctgagatgccatctgtgaggctggcacagtgaggcacgacatccctggtgcttcccggcagcctgcgagggctgcctccctccttccctccctccctcctgcttgcaggtccgctttcagagccttccctcagggcttatgttccactgacctataaatgtttactgtaattataccaattgtcacctcctgcattgtccaccattcttcttgcccttctctatttttaaaaattttgtcttcaaaatagcatgcttcacagtaaaaatctcaagtgaaaatataataaaacaaacaaaacatagttcatcaaggcattcaaaacaactctttgtgacaacagtttaaaaaacagtgaattaatgatgaattgtgcaaaaaaaagtttaagatgccatctctgatccttcatataacactttttttcagctggaaaaatccaagaatgaatgaaagagcttgtagataggcccagacagtgggcagcatggctcttctccagcctgggacacagctcatcactcagggtggatcctggagagaagctgcctgagttcagcctttgcctatcccagtactcactgtgtgcacccagaggagcttctgtgtatctgtgagaccctgtttcctcatctgcaataccaggactcatatcctagcggggctctgaaaactagatcagctaatgtaaggcttggccatgtattttctcaagaatcgttgctgtgaaagagccagtgaagtcacagagggtaaagtcaatggtcaaccttcctgattaatgaatattgattgagcattcaccatttaatagttagctccttctaagtctaatcgtttttagtttctcctgacacctgtcatgtaagaggctctatatgtgaggatagacttagggggcagttggttcctctttttggacacagaacaggaagaataaagagatctcagaaggaaaaggaaagtgggaggaggctgggtctgtgggttccccggtggatcacgctgaaagaatacctggcagacacttaatctctgcggcaaatgcatgaaagtagaaggatgaagccaactttccaaaaacttttatgaaattacttcagtgagaaaacctattaaataaattacagccattctataaaaatagaattctatgttacttctatatatatacttctactatatatacttgtactatattacagtagaaatcagtcaatccaatcccctattgggcagaagggaaacttgcctcggaccacactgtcggctggggtccttagcacggtactaggtctccacctccatgcactaccctggttcagagctggtgctatgggttgaattgtgtccctgcaaaaataggctgaagttccaaccccagtacctcagaaagggactttgcttggaaatagggtctttagagaggtaatcgagttaaaataaggtcattagagtgggccttatctgatgtgaggggaattcttataaaatggggaaatgcagacacacacatatgcaggaggaaggcactatgaagaaacaaagagagaagacggctatccaaggagagaggcctggaacaaatccttgcctcacggttctcagaaggaaacaaccttgacaacacattacttttggatttctggcctccagaactgtgagacaatgcattttggctgttgtaagccacctaggttgtgatacttccttacagcagccctaggaaatgaatacagctggggaccaggcttttagtcaaaagatcagggaggaagtctggtgtcttgggagaaatttctagattataggagtcactgaatatcgtaactttgaaaaatccattttgaatctcaccagaaacacaaaagcctgtagaaatccaattatacaaatttacagtctagaaaaggaaaaaaaatgaaattactcttcatgcacatttaagcagagtttaggactggaaaataaacaaggctttggtaactggggagtgcagtgctaacaacacagttgcaggtatgtggctgtgtgggtttgagcttggctctgccttttaccaactccgtgaccttcagtcactgcccccactgtcttcagctttctccaaaaagagtgttgtgtgtcctcttggaggccataccctggggtgctcagcacagggtttcacacacagtgactattaactggattttagctcctattataattactaatagcagataattgccttattaaaaaaattaaaggcaagcccccaaaagttaagaacatatgtacttgtttgctttttcatcttcttagatgacacttattttaagttttctttgtatgtaattcattctagctctcttattcagcagtatttctttcatttgaaaacagcataatatttagatgccaaatgtgatcatcaaatgcaagaatatggatatcccactaagctatctagttatgctcaaacccaaacaagtagaaagcccttatgtacaaagtgattcttttcatgaacttggaaatttttcaaaatcaggttgctgagttctgatttggagcagcctgtcgcaataccaaatcacctttgaataaacttatcctctcagcttttattgttcagaattgatttcgaggatagaaattccatttccttgtcatatatacctgagccgttgcatcaaattgtcagatcaaacctaaaatgcagcacttcgcagatggaggagagacattctctctaaaaaaaaaaaaaaaaaagtcaaccaagtcagaagttgtgaagctgctgaaaaaagcaaaaataaacactcttaagcaggaaaatagaagacctgttgcttgtgggaaatagattttctagaagttagatcagctggaaatattgtcatggacatgccaaaaggcaagtgaaggaaatgtactgaatgttgttggctttgcactaagaggatctcaggaagcagttcacaagagtgccaccacatgcatggaaggaccagctcgttagatgctttgggcaaataaaaattttctgtagagttattttgttctgctggagccattaagtgctccttgctacatgaaatggtatatagcccttcaaatgggggcatttagcaatataaaatatatttaccctgtccgttcttgaggatcactctttaactgtagagaatatgtcttctaaggcaccagagacatccagagatagagggctgctgatattaataacacataaactttgggtgaaggcataggggaagccagccctcactagaactccactatgcaggcaccccgatctcacactgccagcctccacaaccgtgagaaaataagcatctgttgtttaagcataccctctcttcatagggattattggagcctagaagagtgcatggacacttttcattattattattattatttactagattatcaccccaacagaataggaactgaattcctttttgcaagtaggtgttcaataattatttgttgaatgaatgaatgctatggctactatatggaatttctaggtcaaataggagcagaaggctgggggtatgggggcttgcacttgtaatcccagcactttgggagtccgagtctggaggatcacttacacctaggagttactagcctgggcaacatagggagattccgcatctacaaaaaataataaaaaatagccaggtgtggtggcccgcacctgtaatcccagctacatgggaggctgaagcaggaggatcacttgcacctgggaggttgaggctgcagtgagctgtgattgcaccactacactccagctgggatgacagaacaagtctccatctctctctctctatatataaatgcctgtgtgtgtgtgtgtgtgtgtgtgtgtgtgtgtgtgtgtgtgtttgtgtgtatgagacgaagagcaaaattcaatttagtcatcgtacccacatgtaatcaccaaaaaattttttttaaaagctatttataaccaaaaatatcttctatcaagttgtggtaatattacatgaaagcccattttgttctgctgagcacttgcgtagttctgggagttaaaaggtggatggagcaggagagacgtaaagcactaaatgccattaagtaagaaaaatctggagttcctataagcaatttttgaagtaggagaggtacggaagggtaggaatgaaagaaaaaacccaagcaaacctagcaaaaggctaacaccttccatatagaaatcactgggtaactgactttttaagaatatgaaagtctaaacacagtcacttctcacattatggtgaacattgcttccatttcttcaaaccatcagtaaagtgtggtacaatgcagaaatcccatgtgtgaacaagttttgttttgttggggcagagggaaggctggtggttgggaaaactaaggaaggggctcagttctaccttgagcctctgtggtatggaaaaaagagatgatgacagctactgtgagagaactcctaaacgcaaccaatttggctgaagcagagatgtggggcctggtgtgatcaaggattcataaaagctttggagagaaagcagaacttttcacaatctgtacgatggggattgcagccaattttatttagccctcaggaaatagggtgaccccagttgacccccaggggaaaaaattccctatctcataaacaataaaaatcttaactaaagtttaatatgatagcaaccagaaacaaggcttcctgttgtcctcagacaaccgaaagttcatattcacacacccaagtaaccacacccccagcccctgcactgtgcaagtgaacagtttcattgacaactttggggtctgttttgatcttggagatcttggagttaactgcagagaatgactggagtggattttatgaagaggtattttataaatgcttatgtgtaatgatgagggaaattgaagaaagtgaaacaaacagtaaaaccacatgggaagaattcccgcagaacatgagaaacagaacttgacttaatgaataaaataacagatggcatctcattttttattgggtgtgtaaagaatgagaacctgaaatgcaggtttggttattcaagtgaattagtaaaggagatttatggttttggaagaatcagcagtcatgggggggcaggaaatggttataagtgacttttagattctgtgcttgggtgactaatgacaaacatagcatagtaaaccatcggaccatatcatgcaaacaggctgtgtgaattaattttgttttgctttgtcttgctggggaaattagaaggcttaaacaaagcagagagaagacatctattggattgtccaaaatactgtaaaattttggcaatgtggtatctataccaggcaactacaacttctgtcttatttggtttagatacccaaggaagtacaggggtactctgaaatttacttcgagatacaaatcttcaattattcacaagctggcagcacaggtctttaagtctattgtccttgtacttccctagaacacatcatcttggcaccagatctgctttacctctcagaagtttagagcaaaattctacgaaaggcaggacttttaacactccctcactgtggggtgtttaaaaagactattatggggagaaaaatgaattgctgaataagtagtatgtggaagaaaggtctgtgttgaatgaagggaggtctagtcattaaaaaagaaaaagaaggctcaagccacagagtttttatcgtgtgcctcagccactggggaaacagtttcagtgcagtattatatatgaaatgtttcctattagaatcaaagttcccacaatggaacatgtgcgacaatactaactaaacactaccatctagtggccagttttgagaactacaaaagctcgcaaagtgcattaaaaacaccgtgaaagaaatgcaacaaccaatgaaaagatgtttaattttcccttagtatcagggaaaataattgatcacactatatagtaaatgaagatatgtgtatcaagtgctgctattctcaattacccttaaaacttagatgggcttgcagggagtctcaagtgcatgttttgctgtttatagcaccagtgtagagatatttccaccaatgacaaataggctgtaaaacataaaatcctttagaaaagtgataaaaatacaatcagtatgaggactttgcttcctcttcccctccccacccctacccccctactatccctcacacctaacacctctcacaagttgctattgtatagctggcatagctggaggagtagaaagagtgagctcacagtcagcaaagctgtgtggtgcctttgttccacacacttctggctgtttgagcctaggttagtcacttaacctttctaagactcactttctaaaaatacgcaaatatgtaaattgttgctcttccagtctccctgggtttaggggaaaatagaatgtgtacaaaaatgcattgtaaatgcaaatgtgccatacaaaattgctattagttttaaaatctctaagtgaggatgatgaggatgtgaatctgatatttgaaggtgctaaacatttttttaattttttttcaaaaagccatttttcttaatattgttgatttcctgagacaaatatctttgatctgggttgaataattgtgggaattctcaagtttatcctgcccctatacacgcagcaaaagaaagctaattaacttgtccaaatttttacattgaatcaaagacgagactgagaacaactgtcatagcttgagtgttgaagtttatcaatctaggaatcctattgtgttgttaatgtttccccagtagtttcagtaagtaatgtaaacccatgaatctaaattataaaatggctacaggtaaaccatgacaccaaatttcacttcatatttcattattctaagatacaagggcagaacctaaagaaagggtaaaataaaatggacttacattagacttactgacaccatcattatttgagaaagagctatttcctaggtatattttaggaacttatctggtgatatctatctatctactaactttaggagtggggtggaattaattctttttacaagattagtgaagttagaaacaactagtttctaattgattaaatgtaacctattttcaagtatcttcatatgactgaaatcaatctgttttattttccaaaccagtggaatagacacagagtcattacaaccagaatgacatggcattgttacaaatcttagtattaaagcaatacttctgtttttatgtataattattttataatggaaaatgtccctcaaaatcagacgatttgttccacaatgaatcatctactccaaacaactctgttccaataattaatgacaagaacaacaaacacttacccaccagatccttatggtaaagctaacttcagacaggaaatgcagaactcagcagagttcattatttttcatttctagatcagaacaagtttatctaagactccaaataaagttcatgctttgtgcaacgtgcaaatgacagttcattatattttcttgtttcacagagaaaaactcagaaggaaaacatctacaggagatacaaataaagaagggctaggtgtttctgaaaataatcttccagaaaaaaaaagtggccctcttgaaactcatcaggaaaaaaagtacttaagaaactctaaaacatttttatgtgttagaatcaccggggtaattttggcaatctctatgcccagatcacagcccacatcaattagaagagaacctctgggacatgaagatcagttttttgttttgttttgtttttgttttcattttttttttaaagttctctaggtgatgccaacacgcagccatatcccacaaacactttagttaagaaatacatactttgaagcaggaaagtaatgccctttttggggaaaacagtcattatatgatcacagattatttttataacttccatattcttttttttttttttttttttgagacagagtctcactctgttgcccaggctgaagtgcagtggcgtgatctcagctcactgcaacctctacctcccaggttcaagcgattctcctgcctcagcctcccaaatagctgggattacaggtgcaaaccaccacgctcagctaatttttgtatttttagtagagagggggtttcaccatgttagccaggatggtctcgatctcctgacctcatgatctgcctgcctcggcctcccaaagtgttgggatcacaggtgtgagccactgtgcccagcctccatattcttacatgagcaagaagcaagaattcattttatcagtatgtaaattgtgaaaaaaacacatgcaggtgagaagcaggggctataaggatgaaatcaatgggccagcagagaatacagtgcatgaattcaatagtccctgcagtgctccctgctaggcagtgcagggatatagacaaatagtggcctgatgtctttaataagctgataaatagttggggccaccaatatgtaaacaaagcaagaacatagaaaacacgctccaaatgggttacaagcagagttgtggtgtagggcagaggaagataatagatgctaatgatttaggatggtaaatacgacaacaagagtacaatctctacctggttgattccaaggagtttaaaaacgtaaatgcatgaatgaccagaggaatcctcaccaggggagtacggcacaggaatataaacgtgacttgatgtgcaggctctaaggcagtggttctcagaatgtggagccaggtctgcagcgtcactatcacctgggagctcattagacggtacataattggatcccaccgcagacctacaaaatcaaaaattctggggatggggcctagaaactccttttttttttttttttcaatttgtctctgccacccaggctggagtgcagtggcgccatcttggctcactgcaacctccgccccccgggttcaagcgattctcctgcctcagcctcccaagtggctgggattacaggtgcccgccatcacgcacagctaatctttgtatttttagtagagaaggggtttcaccatggtggccaggctggtctcgaattcctgacctcaagtgatccgcctgccttggcctccgaaagtgctgggattacaggtgtgagccaccgcacctggccccagcaatgagttcttacaaccacttcaggggattctggcactccaggtaattctgatgcatcctaaagtttgagaacgagtgctctaaggttttcttgaaaataaacaaatacatgaaattggccattttatcatcaacattcactaaagtagatggtagtatgtattcactcatgcttcaacacagacaaggtcacgtgggctaggaaccattccacaggacagcaatcttaggtaaggtcttaaaataggaaatagaaaattagttgttttaaaaagtgagggagtaaacagtaatattaatgcaaacttgctgattgcaggtactcaaaaaatagttacaaacttgtattttatatatagcttataatattttagacttctggaatgaccatgtcccactttctttttaatccctaacttttatttattcattttctatttctatagtttttggggtacagtgggttttgtttacttggacacattcattagtggtgatttctgatattttggtgcatccatcaccggagcagtgtacactgtacccaatatgtagtcttttatttctcaacttctcccaatctctcccccatccccaaagtccattattcattcttatgcctttgtatcctcagcgcttagctcccacttgtaagtgaaaacatgatatttggttttccattcctgagttacgtctcttagaataaatggcctccacttccagccaagttgctgccagagacattatttggtttctttttatgactgagtagtaatccatagggcatatataccacattttctttatccactcgttggtcgatgggcaacaagtttggttgcctatttttgcaactgtgaattggacaggcctgtgcatgtggtctttctcgtagaatgacttctttccctttgggtgaatacccagtagtgggttaaaccctaacttttaatgtttaccttaattttaaaaatacaatcacccaaaaccaaaaatgaataaattataactccattccacacttggataaatctcacaaacctactcaaagaagctaaactcggaagagtatacagaatattacttcatttcataaaacttaaaaacgaggaaatcccccttgtttttggtatcagaagtccaatagtgattattctgggtgtgccaatagcgttgtttctttttctattttttgttttttcttttgagacaaaatctcgctctgtcacccaggctggagtgcaatgacatgatctcagctcactgcaacctctgcctcccaggttcaagcgattctcccacctcagcttcccaagtagctgggactacaggcgcacaccaccatgcctggctaattttttgtatttttagtagagacggggtttcaccatgttggccaggctgatctcaaattcctgacctcaagtgatccacccgcctcggtctcccaaagtgctgagattacaggcatgagccaccgtgccctgccacattctgtttcttaatctacaatacatttgaaacagaagactttcaaaatgtatgtaatgaccctgtgtgtattccactggtttggaaaataaaacagattgatttcagtcacatgaagctacttgaaagtaggttacatttaatgaattaaaagctagttgtttctagcttcactaatcttgtaaaaagaatcaattccaccccacccctaaagttagtagatagatatcaccagataaaaggtcctaaaatatacctaggaaacagttctttcttaaataatgatggtgtcaggaagtgtaatctacaaagtccccttctagttcaccctttctttagcttctggtgagccaagtgtgttcacttagtgaaaattcattgacttttacacttacaatttgtgcacctgcatttatgtatgttttgatgcaaagttcaaaaaatataagaataggatgaatgctatgttagagtttaagaagtcaggacattttcacttccctttggcatttaaagatgtgttggatgttggggtactgctctcagtgaatgctggagacaggcaatggcacatcatccaatacagtgaacaaaggcaagtggatagggatatttagtccttgggattctaaaaatctcaaagaagaccacaggaatgaatggtcagtttctgacgatgcaaggcaatttattctggctctaataagacctgagttaggacaaggcaaaactgtgaagtagatgagattgtgaacagtccccgaaataactgttgggtggcctgtgcctgcaagcacttttgccacctccccgtctgtcagggtcactctcctattgagtctctgccactgtttccagccattctccaaatcttgatttaatgcttctttgcccctctcccactattcctccctactacccctcttatcctccttatctccttccttttcatcaaaacctacctgttttctgtttcgttatctcagaatctttgttattagccagttcaataaaccactgggctccccagccatgctaacaggcaggtcagagctgagaagctctaagctggttatgaaactgagggagcttcactcagacagcgttcctctccaaagccatatctggattttactggggcctgaggaccttaatgaaagggggaaccaactcaccttggagcagaggttctctggctagcgcagaggtggcacagtattgacttgctctacctcactgttgtcactgatgtccctagacataccctgagcctttttctggagacctggaaacagttaataccagagcaagtccccacttatcaaaaggagcagcctgccaaaaacaatgttgtttttagacaagtatgttttaaggcataaactgaagggctaatggaacagccattgttctaatggatttttaatgaggtgtaaagttctcagctgattgacagtcaacaaggtgtgaaattttacagaaatattgcattactgtgaaattaatctcttttattcaagtttattatttcttgaatctaaaagtcaagaaaagcatgagaaagatgactattaaaatttctacttccctataattaataggaaatagttacaggactacagttaataactatattttttcaaatatttttgaaaattgttaagagagtggattttaagtgttttcaccacaaaaatgataagcatgtgaggttatacatttaattagctcaatttagccattacacaacgtgtacatatttcaaaacaatatatagacaatgaaaacatgcaatttctttaaaaataaaatttctattttcctttaaatacgatttgaaatcaagagaaaaattatttttcttggttttattttatggagaaagttatggaagtggaagggacatcataaaggcaggacttttctgagctcagtttcattgactgcccaggtgccctgggagtgataatgacctagtagcaaccaacgagcccctttctggccagcactgtgagatcaatgctccagggcattgggttctaagcccagggattcagcatctaagccacttgggttcaatacccctcttagaccagacaaaaagaggtcctgccctgggagccttagaaggcccactctttcccttctccagtcctgcctcttcctttgcaggatccttggaatatggtcacgcagagccccaaaccaatgtacttttagaccgtgacctgggagctcatggcccgtatcagctaacagggcctgtggggtcccatttcccccatgcttcttctagagggcagacatgtcaccagtgtgcacaaccctatgcctgggggtggctacatatgtagtatgagggtaggaggtactgggccaaaacgcaggcacctgggctggcttgtccccacacacacacagaggtgcttcgtggttccagacagagccagatgggaagagaagagcagagcgggtggccctttccctcaacactgagggattggaattgctgaattggaatccggccttccagacaattatgaaagcatatttgtcaaggaaaaaggacagacctttaacactgagggagcagatagaaccgaaacattcaggttctgcatttgaacttgatcttccaggtctctgtataggcttaagttgtcaaggaagtaggccagagcttccttcacagttcattaggctgatttacaacttttaaatatttagacaagtggtatgcaggctcccacctgtattcttacctcacaacctcaaaatttcagaagcagcctgctctgagccctacccaagacctacggagacagacgtctgtggtggggttgggaaatctgaattttaagaagctcttcagatgatggatgcccatcattcatttgcctatcactaccttagacccttatctccactgtcattttttaaatgctgagtccatgtgtcaacaaagtagcgttgaataactcatttgtaaaaagtggaagcagaaaaatgacagatttcactggaacactaggcatgtgccaaacccagctctgttctgctcaggaaacaggcttcctgagcccccatgggcttgtggcttccagtctgattttcctcagcccagtgacatcctgtgggacagctgtcattgtcctccatagtcattccaacttcagataatgctccctcttcaacagaactttctcttttaagattggccattcttacttcctggttcctgaggccaatttttgacccaatatctattttcttctcctaattcctctactctgcaatgcccaccattttggttttaacatacaagtgtttaacccagagctctttgatttctcctggtaggtgagaaagagtatttgtttgggcaaagcctgctaataaaccagcagtacattgagatcacctggggagtcacaaaattcccaagcctaggccccattccaacctgttacatcttgatctatgacgtttgtgtgtgtgtgtgtgtgtttgtgtgtgtgttaaaagcatggggaacagataagtttccattattctgctcacacatcaaaagtttcaaagaacccttttccccagataccgagagattttggccattcctttagtatttttacagcattaaacaaagactgattatgaatataaccccagcttattgaactgtgtgcattctcttaatgcctgcaaatgctgcttgcaagagtggcctcacaccaaaatgtaccccaagttcttctgtaaagacaacttgcagccaaggacagctagcaccaacactactgtcttccagaattttaagtggaggctgaaaggctgaattagttaaaactcccaggccttcttggttaggacagtgttcttgcattcttttttttggcaggggggccgggggcactattcaaaacattccagtgacatatcgagtcactaccccgtaatttaaaaatataatgtaatatatgtactttatggaagtcgaagagttgtgctttaaatttaagtaccgtgccttagttggcgcctctaacatagggagttggacattgctaatgatttgccctcattaagcaaagatctttgagatgcttctatccattaaatactgtcaatgtgattcctattctagctagttggtatagagcaccaccattttcaaaattattaaggaaaaatcacatctaaattaagccaaagggactagacccatcgaaagtgagatataaagggctttgggcaataaaatcaaaatcatttgttagttgtgagaaaacttaaatcttaccctctagtttaatttttaaagtgtcgaaggaactacaaaatacaaatttcccaataaagaagaaaatcaagaaaaagaagacagtactagaataaatcataccatttggtacatttatgtaccaaatttaccctgggtaattcctattttctcaatttcagcaaagaggagtaattttaggatatagtattgcctgcctggattataacgatgtgctaagaggctgagcatgtgtctcttatgtacatctccagactgtgcaggcggagctcaagttggatttggcatcaaggtccaagtttagtcattaatctattgatgaaaactgtactttattttcccccattgaagaagggacaaaattcaattccatcaagcagtcttctttgtacagctctattctactcctgacttagattcagagtcagaggaccagagttagtgctcactccaaactattaacctttcatctagggcccggggtccatctctgcctagagagcatgtgggaacccctcgattgctttattgcatcgtttattattacaaagaataatacacatattgaataaaaaatgtatactgcttgaaaggcaattaagcgacttctcataagtcacgtgaatcctgaaatgtctattatgttttagaaacccaaagataattgtaattccattgcctggttaagtcatgctcaagaaacacggtgctccttatggctgctcgtcaatcctctcagcggccagcagatggcgcacacttctcagaaacatcaaaacgtggcgtgggaaaacccgattccgtggggaaggcgggccgcctaacacaaagctgtctttccgtaaaaatcagtcggccttcacagggttacagaaaattattcattatgtacaagagcaatgacgttcagcaatgtatacagttgctgacagtcctaaagtgggatatggaacaggatggttcatgcccatttttacgtatttgaatttatttcttctctgggtactgtaagtaaatgaatgttattgatttttccttatgtgttaagtgctgcaccgatattttaaatgatgactcgtttctactgggaacttataatgaaaagatggagcagtagaaatagaaaacctctgggccatctccttggtcaaggttagcaggttagtcctttggtctagctctgccattcagaaccttggaccatgcatttgctcccacccctgggatccaccatctctccctggctccttccaggtccaccagcctcagggtcactgcagtctcagaccacctgaaacgcagaagccccgcctattttgctagctccctcgttcctacgtattcccatttttccggcttatttaaagaataaaacaatacaaactttaatggctatttgtactttttaaaaatcagtgcattttcatttgtgtactcttgtggatttgggcaacagctgaaaaatcaaaataatttgtatctttattgatcttgaacaaatgctctaagatgcatacatttagcagatggactcacttatcatgtgggcttcttttcccaaatgcagatgggatggaagttgacatgaggaggcagtataataagttaggaagaatctggacaaaggtataaaggagctaaacggaggctgcagaatgtggagtgaagagctgggacaggtaactcaaggagaaagcagagagaaggaaagtgatagcacagaggcaaagggaattgactgacatccagggaaatgtgtgaatttgtccagaatgtcctgaaaactttgtgccgtgggacagacctaagacctggactatattcataaaaagaaacatgattttccctggggaattttagaccaatcagaaagactcctaagctctgtcttttcaactttccactctacctcattatccaccaagctacttttcccacctctgttcaattgatttcggaaagagatgcacataccaaaaatatgcaagtctgccacagatttattctttctcactttagctgtgtcctcagtcgccattttaatcactctcaaagaatgctctcccatattagctacaatggatatttcaaaactctcttttcaaactccctgacctggctggtcttcactctcattaaatgatttcatgtcctactttcctgactctcagcctctctccatgagctcaggtttccagaaagcagtcatgtccccagcctctctgccttcgagaatgatcctcctcttgtctcaggctaacctcctgtccagctgcatgaagcctcagaacagagaagaaactgtgtgagtttcagactctggagttttaggtttgaatcttggagctgccactatctaggcacatgctcctaggcaaggtacataacttttctaagactctattttctcatatgtaaaaacgtggtgataatacaacctcctttgtatgatatgggaatttcctgtatgttatttgtgaaaacactttccctactacttagcaataaattccctcatatctctaccagttgactgtgaagaattttaagcccagaagtacattactttccccatcgtgagggttgagcctagcgcgaggaaagtgactgagtcctggtcccacaaacctgtgaacctaccctctcttatgtcccaaccactgccatcttttctgatagtaccattttgttctcatttttaggctctactatgttctcctgagccttacaatggcctttcctccctctgcatgtctgttcttggatgatcctgtgcactgtgataactctagtcttggaggtgaatctgaggtccacgtctgaaacctgaaaggcatctccttttatctactaccgctttcaaggagatgctcttcaggtgccactgattctggcatgccaaaaagttgcatctgcaggatggttgtagccctgtttataaattcacaggctcaatttcaagaccttatgagaccctcaaatgtatcaagtggggccaggcgtcatggcacctgtaatctgaaatcccagcactttgggaggccgaggcagacggatcacctgaggtcaggagtttgagaccagcctggccaacatggtgaaaccctgtctctactaaaaatacagaaattagccaggcgtggtggcgcatgcctgtaatcccagctacttgggaggctgaggcaggagaatggcttgaacctgggaggcggacgttgcagtgagccaagatcgtgtcactgtactccagcccaggtgacaaagtgagactccatctcaaaaaaaaaaaagtaaataaataaaaaagtaacaagtgagacaagtgagataaaactaaatccagtttataagaaagccattcctacagccaatgcaatgttatctcttatcttcaacctgaagcacaagctgatattattttgcaatcttattagcagctcaaacagctgtctctgccagtaatatacacaattgaagggatgccagagggcaagcaccgaacctggctgcaaagaaggggaaccgttccccaaattttgccaagtcaggctgctgtatttcatttaaagtgggagacataataatattcctaaattctgataccaatagggttgtttatcccttctatacctggaagacttgctgtaatattttttctcatttgtttctaagtacttaatatcctatgcagggggctattttctgggcatttgcttatggtccaaggacaatctgtttggatgcttacttgctgttctggttaagcaaacctaatggttcacaactcccttacaacaatcagggagttttggcaaagattactaaccaagtcaagtttacattggctcaagcctctcctacatgaatgccaccaataattgttgctgtctctttattacacgtctttgaggcactgactgcctccataaaactggagaaggcatatgtgtatatatactatatataatgattacccaccagtaccagctttaatgttttcctctccacctaatttctttttgctgttcaattttcacaagcatacacttgtacacacacacacacacacacacacacacacacacacatatgcctgtcattggttacctttcccccggggaattaaaatccgtatgattcaataaggtagatttatttgccattagcagacaaacatgaaaataattcctaagccaataaaattattttcaagtttttcagttttccttttttcttataatggcaagaacatttgactaagagtctagcaggggaaaatactgtattcacaaaagcaatgggaaaaaaactcaggcctgttaaggaaactctcctataaaatcaaattgcaaatttttcaaagttgccaatgcttggcacatcactgtctgggcaggataatctgttcttaccagtctcaactcagaaataacctatttatgattgcaaccatcatcttggcctcagggaggcactataggtcccttaatgtatctaaggcacagctgaaatacttaaaaattacctctgaaagtctgaaacatgacagaatggaaaaagaactcacagaagataacataaaactctatattctgtccctaagttaatgtaagagattcatacgccttaggaagacgagataatttagcgattgcgcttagaaaaataagtaaataaatatgagttagagatatggttggtgacactttttttcctctgggtctcttccttattttccccttgttccttcctggcactagggggcggcaaacgatgggctcctttatttataaaaaaagacagtttttataaataaagctttattgggacacaaccattcccatttgtttacttattgtctgtggctgcttgcatgctgcatcagtcaagtagttgcgacagagactgtctgtcccacaaaacttaaaatatttatgcttgagccttttacagaacaatttggctgacccctgcatgctatctatagtatttaacaatggatatgaaagtgacaatggtagatctaaggaacttcgatatgtgtccagccagccaggataggggccagcttcctaagacacatgtctagaatatgatgaaatcaccacctgccagtgagtcacatgcaggcaaatgacaccaacagaagaaacctaggaagcatatccagaaactataaagtattggtcatgaaccttgcaggggaggacataactggtgttcgcatctctgcttccagttgacagttcaccaaagataaaaacaacaaataaaatccagacctctcgccacaaaagggggtttggcttcaggcaggggcttagggctctctgctggggaccagctgcacttcacaatgctgcaaagcctgcatttgttcagaaatgtaattcctgatctgattataagagttcaaagctgaaaatgtggtaaggaggaggaaaaaaaaatgggttatgatggaagattttgtggtggtggtaagggggcatgataataataatattgaagaagtgccctagtaatttacatgagaagggaccaagaaggtggctaagaacagcacagagtctcagatatacacacgtttttgcacagagtctggctaataacacaaatgagagattttagcataataatgctgtattatcaaggaaatagacatcccatctgtggggaaactgtcaacatgagagataattgtggtagagaagagatctagaaatgaaggataacaaaagaaatgaaataataggcgcaagtccctggccctcctatgtgccacagtccaggggaacaggagagctgatgggagacctcggttgggaaaatcttatccattccaaaaggaggaaaggtcaatctctgaaactatttcatagttgattttagtattggtccctgaaaacatttcagaactcacttaatcagcagatagttttagaacgcaagagggtgaagttatgctcagggcagcaggcctggttggtgaggatggaccacaggtacggtgtggagggtaggtgggtaggctccagagctagtctgctgggttccgagttggctgtcttacttcctagctctgagacctctgcaagttacttaacttcgctcttcctcagtgtttttagttctcaagtgggcatagtaatgaaatggggtggttgtagggattgagttaatacatataaaagagttagaacaaatccagctgagactagtgccatgcaattgttagctagtgttcctggtacaactatcagaccaggggccaggagaatgctacagacctggctgaaactgaatttcaacaaagcatttcacaaatgcatacaaaatacagccaaggacctgctggaaaagtggtctgaggaacacaaatacatagattcatatttggttttacaactagaaattcatttcagcctaaggagacttctttaatttcaagccttgtgattatcctcagccctgtcctgatcgacatttttcatcaagaagacctgaaattattttattgtaaaaattgtgaatattgtgaagtattccaagcatacaaaaataactttcgggatttagaactgacaacaatgtggaaaagccatacatatctaaagcacgagtgaattctttcttactgaacctattcaaataaagactgaaagacctggcagtgaagggttggaagtgtcacatgaggcatatattgagatgaactttgaaaattctattcacacatgaagatgtttatgaagtattttatatatgttaggcattgtcttaggtacttggaatgtatgtaaacaaaataaacacctgtcttgttggacttacattcaggtggactccttaataacctgtaagttataggaattactagattttggtttaattctgaagtttgtcactcactatatataaacctgataagctccctcgtttttttctcatctggaaaatggcgataaaatgccatcctttcatatttaggatcattcattcgctcaacaagtacttcctactttgtgctatgctcttgggaaaaaaaatgaatgagagaaggatcctgccctcatggtacttgtatcttatattatccagaagataaaataaggcacttaccaaaaatactaacatttacatatcaatgaaaggctatgcctattatatctaatgatagcagcatggcctgtgagtctttggtcgtctttttggggatatacaatgtatattttggctgttacctaagccattctccaatattacacccctcactaccgctatgtacacagatagtctgctccacactcagaaaggtagggacaacaccctaggatttccataaagcttagaaggatttccttcctaagaaatacccagttttgctgccaaacactcctcccctcctacatgaaggcctgagtcaagagatatcgtgggtgggagaagttaccctgcatgtcaccagaacctcagcatgcacactttaaaatgaatttccaaatgcaaatttgttcctagatccacagcatggcaagtgagatgcagaagcctggttcctggaggaggagccagcattgattcgtggagggcagtgtcctctcacaggggtaagtgagcaggggtaaatcatcgttcccatgaactcctctccatctgctctccccactctgggaacactagtgtgctgctccacctccttctgccccctcctgggatgggctccagaggatgataggcagggcacctaaattcccagctgacggaaacgtgaatgtgctcagtagctaaaggtggctcaggaagtttggaagattagatgagatggttctccctctccctcatttagatcacacacattttccaacatgtaggggagaagagggagctctgtattttttatttatccaacaaatatgtattgaacatctaccatgtgtgggacagtgtcttaggtattaggaatacaacaaagaagaacctcaaatccttactggtatttagattactaataccgggaggagtgggaaagacacatagtaaacacattaatgacctattaaatatatgctgggtcaccactatggactgtattgcgtccctcaccccaattcatatgttgaagtgttgatatgttcccatcaattcatatattcctatcagctcatatgttcatatgttgaactctcaatgtcactatatctgaagatagggcttttagtcagtaaataagtttaaatgtggtcataagggtagggtcctaatctgaccttataagaagaggcaaagagctttctctttctccctacacaggcatgcaggcacgcgcgcgcgcgcacacacccacacccccccccacacacacacagaaaggccatgtgaggacatagtgaaaaggtgtctgtgtctgcaggccaagaagagacccataaccagcactgaaccaagctggcacactgatctcaagcttccagcctccagaactgtgagaaaataaatgattgttatttaagccaccccatctggtgttttgctttgtagccttgctaacactgtcaggtagccctaagtgtgctgaagaaaacccaagtggaataaaggggtggagagagatcaagagaggtggttagggagacactctgaggagggacattgagcagagagcccagtgaagctcacatgtatccaaaggcaagccctggcctggagtttaagaatggcaacactcaggcatggcagggtttgtccttagaagcaaatgggattgctgttttatcagcatgtttttgaaaaatagactgttctcttgcagagaggaaatgtataattggtgatcgcctagctgtgtgagcttgggcacgttccttaaatctcatgtcccagtttgctcagttgtgaaatgggataataatcatctttaccttgttaggttgttgggaggtttaaatgagttaatatatgtaaagtgcatggacccatgcctgaaacacagtcagtgctcaataaatagtagctattattattgctatcaatacaactactatctctattattacaacaactgctactactattactattggaaagccacaggcagaacattataaaagaaatttcagcaatggcatctttcaattaaatcttttctgagcatcttgggcctcactacctctgggaaaataactttgcttctttgtctccctcagctcctcagaagagccaaaccaatgattaagctcacgtgttgtgaactgcaaagtcatttgaacaatttcaaagccatcagtgacaaaggctttctcctgatggatctttctgcccattgaactagaacactcatggaaacatgttcaggctccctcactccatgtaggtcagactacaggtaaaatatcctttctggtgccaaaaactcttatcaggatgaagaattttcctctagtttccctggggaagagcaaaaaaaaaaagtagataaaaaaaaaaacacaagaaatagagtagcaggagtgaaggagaaaaattgaaaagaaagagataaatagggggggaattttaaggaccattagtaatttactgtggtccccaatgttgacacaagcaatcaaaatggacctggagaaggggattatatgggctgacattgtctactttgatctatacgtgccttatattggtagatctttaaagaagttacttggtataaagtttatttgagtgcattaaaatgagtaaataatattgaaaaatgttttcatccaggctatgcttttatggaggcaattttacaattacttaaagtgaagtgaaattgttttgaatctgccagactgtaagtttcctaagggtggaatctatgcaggttttattttgagtattctcgccttctcaacgcctggtaaaactgagttcataaatggtcaatagctgcttatctagcagttatctggcagcttcttgcatgttttcttcaaaaggactccaaatctactactttccatagactttcactttttttctcccattcttccagacttttttttcaacatgttgtcatcagaattttacacaccacagcattgcccatcaaacagacctattactcataaatgctgatgttatttctacgtgataacgtagagttgtcctccttgattttggtacaattttatggaaagcaggtggtctgcccatcattttattttgctttttggaggaaaacttgatatttggcactaggtatgactgtacaaaatcttcctcactaatgtgattacaccgtgagtcaaatgaagacttgaagggggaaaaagaattttgaaaatgaggtcctttagcaagactatttggacagtagctatctttcccctctgtagctatgaaattaagtgggagaggaggtggtaaaaaagaaccagaaattagaaagttttcaggcaagcgtgtgcaaattagaactgcagtagaatgtgttgatttctaatttgaggcaatttccctagagacaacagaggcgttttgaaaagaccataggatttatcatcagaagccatgcattcattttctgctactgctgcatactagtggttttgccttcaacagtcatttgaccttgaacagccccttggcctgtcagaaacacaatgtccgtgtgtgtaagatgaaaacaacaatatttgcatcccacagggatgatgaagatgctatgggtgggggctttatgaacaatcaaccaagatttaaataccttttccaggattcatctctatgtttctttttcttgcctctcccattttctaaaatcttcaagacaatgttattatttcttcacacacatcctccatttcgaacttctgcccactcctgttgtttatcttttcattcgtttttattcaagtggctgctaagggctactctgcaaggtgcgtgaacacactctcctcaggctatccccaaatcaggacaagtcagctcagatgaggctcacttttgctgaacttcagatgcttttatcattttccttacaattctctcctattttttgaagtttagaggaagaaaactgcctggatgctaagtgttgaaggaatcagacagagcttattacaaacaatctgggtttctaagtaaaaagcaacatgaaatccttttacccacattcagataggtctcttgtgtttcttgaagagcagtcgtgggactagctaacaacctggggtatcagtggaaaatactttccttcatctgacacgaacatgcaggaaaagtcttaatgggacattgcagttgttttgcaaaaaaatgaaagaaaaatcattctatgggcttgctcctcttgacatggtagcgctcaactcccaatatatatctatgtatcttattcaggataataaatgaacattaaaatattgtttgtgtttaaggtctcagtaagcgataactactcacaacctggttggggtttataggagttcataaaatatgccaagaacgtctaagctttcattcccttgtattgaatctatagtaagggaagtataataaatgaaaattagggccaggcacattggctcacacctgtaatcccagcactttgggaggccgaggtgggcagatcacttgagatcaggagtttgagacaatcctggccaacatggtgaaaccccatctccactaaaaataacaaaaactagctgggagtggtggcgggcacctgtagtcccagctacttgggaggctgaggcaggagaatcacttgaacccaggaggcggagattgcagtgagcattgatcgtgccactgcactccagcctcagtgacagagcaagattctgtctcaacagcaacaacaacaacaacaacaacaacaacaacaacaacaaaagaaaaagaaatagaaaattaggatttcacaaaaacaaattttaagaggaagattacaagattactcgctaagttagtgatgccaaaaaaggtaactccattttgaatcaattatggcttatttaaaatatctcatttttaaggtggagacatccatttacacacttacattgaatgaataaagactgtctatttcatttactaagtttatggattacatctaatttatttatattgttacttaatagtttttggatgtgtacaattctgaagaaataaactaaaatatgccagtataatcatgtgttttaaataaagtttccttacatttctaatagtttttgtcttatagttttagttgctatattgttgagcacatgtgcatttcaaataattttaacttcatcatttctatcccatggtgttctagtaaatggttagcaattggctctagaggaggggaggaagaaagccctgatttgtatcatttccaatttctacggtgtaaataatcacactgtggccaatttcaatatgatgttattgaacatggagttaggaagatatgttaaccataggctcttacaagctggtaccagctaacgccctaacaccactgattttacctttttttggtgtttaaacttgacatttccccttgtctaatcttaatattgttactgctgaattgttttggtttggatttgccctatgtctttgcatatttctttattcccaatcgttataaataaattttaaatgtttcccacaaattgtatataatgatttgtgtgtgcatgtgttttggaatgacaggctactgtttatttaatctgatactgacgaaaaattggtctatttatatatgatataatatggattttactttctttttgttatttatatgttattagaaagggcatatataattaaactttatactcaaagaattagagatagggaaacccagttttatgaacatccaagtaaatgcagacaattctcttcattgaaacaaacatgcttttatgatcttggatgagtagaactattgtaatttttaaattttgttttctatatacttttcacagtgaaggtagatagattaatctcactttgtattggaggtaatgatttttaaggagaatttttattatactagaatttgttatatttcattttatttatattttatgtaacttccccttttttaaaccaatgtaatatcttagcttttagaaaaagtgagtagagagggaaagagtagaccatgaatgaaatgctgaactttggcatatttaatacttgttcaaatgtgatgtttaaaatgttgctactaaatagatctttaccactctaatttgaagactcttctcccaagtaaggcattttacaaggactgctgaaaccacagctgcccagctgtgagtagaagccactctgcatacctgtccaatccagctttatacgtggcctaaaacaatgcagcccctgataactcattgtcaattgactgcttggcagcttcaaatatgacagtcaagttccagcaactgtctcaaactaaggctgtctcatacagtcatcatggtcccccaaaatggccggtaagcagtagggatggaaaacgctttcctcagctagactgactgctgaaatcctggctcatctaattgccatttttcctaatggtcttgtcacgtaaaagagttataccctggtttacagaatggacagccatccttacaaatcagtgtttttaacaaagcaggcttgattttctctagctatagagctgcagtgtcttctactcttttcaagattatctgaagcttcagcagatttgtactgctttgtgctgtgtctcttctcaactcaggtcctaggggttcttggagctttaaaaagagtttcatctctcacctaaggctaataaaatcaaactcatgtccctttcgccccctgtttaatgccttcctgtataatgctccaatttgtagactccagccaagggccaataaagcaatttcccccacatttcatgatttcctgcttataatgcattctttttttttccattctttgaaaaacaacattaacagtgatgcttttagtttatctccaactgcctgcagaatgcaagaatggagggaaggacagagcttgcccagcaaagctttagccaagagaggagtcgaccagcttggcagcctctcctttcccccagaggctccatttgaaagccttaagcagcctctggaacccttgtctgcgattcaacactagaacagtctttacacatttttctgctcctacctcatgaaacagatagagaggtctttctaaaaatgtaaatcagttttgtcattctgctaggaactcttctgtagtttctggctgcacttcaaaaacatcccatcttacctccaagtctgcaagttccttgagccctgcctacttttctgatttcctctcatacaactctccttcagacttattactacttaacccttccattttttttttaagataacaagccattctttgggacctttgctatttttctatctagaatgctgctcttcccacagaaattcatctggctggctcctgcctatcatcctcatgtcagcaaaattgcatttcagaaaagcctcctttggctggttgatttaacgtagtctctgtcgctctccattgcatcacccagttttactgtcttcatagcagttctcactgtgggaaaacatcttgttcatttatttgtcaagtagttcattttttgactcttctttcaagagcagcactgtccagcagaaaggcaagccacctatgtaatttttctagtagccacaagtaaaagaaacaaaacacattttagttgtgtattttattttacctaatacaatcaacaactatcactttgatgtgtaatcaatattaaaaattttattaatgagatattttacattcttctcttttatacaaagtccttgaaatccaatgtgaacgtcgctcttctagtacatgtccactggaactggccacgtttcaagtgctccatcacgacacatgctggtggttactgtaccactgtactgctagtgaagctctagaatgtaacccttctgtgagcagggacctttccggtcttgttcactgcagcatcccttatgtttatagaaagactagtgcctgacacacagtggccattcaataaatatttgttgagtaagagaatagttcaaagaattttgagatcacaatggaattcttaagtaaagattgagtatctatctttatatacaatttcaaaggctttcaaaaatctaaataaatcaattaattaacttggatgacgacaagtacttatttaataatgtaagtatgaatttggcgggaaagtcccagtcttttgtatgcttcacaatctcctggatattgcccagctcccctctggcatccactgagcccttacatgcaatgccctctctctgctcacctcactagagccttatcatcccagctcaaattctcactacaatgagaagcagatctcctccaggcacacttggacacaccttcacttgggatcccactgcactgtggatagtgatatattacagcattatacctgttttcttaaaatagaggtgtcctctttctttgtctcaatttctgaaaggagacttctgataccactcttggattggtaatagcactagagcatcactttagacctcttcacgggaagacataattaatttacctcattagtaagatgaaaaaagtctgatgtctactggtctctgcgtgtcaattgggtgcaatcaatgtatctcaactgtccttaccccagagagaaaggagtgtaactgactccacagagcctttcacatgtgatacattggagataaaatgttaagcatacaaaagcatccaataaaaataaaaaatatctttattgttgaaaaatctggattggacattgtaagtaaagggttagcatcaggtctgagctaacccaggcctacgctgaagaaccatctcagagttgccttctcatagcactcatagtttagaagctacagagttaagaagaatacagcatgccatgtctgccttgttggtggtggcactgcacatgggtggggagctgcagggtagcatagagacctgggcatctaaaccagaacagttttgaaagactagttggaaactgaggacagagtctctgtggtaaagtgacccccaggtgtttagttcttgtccatggtggccgcacacactctgtgaggaagcaatggaagctgtgtacctgggtgggttctgtctcatctgatgacattaagatgcttcacctgctgtgtccgttgccctgtatccatccataaagctatagaactgtagtattaggctaaagcttattgtgccttctgagttgaacaacttgagctgtacttaactggtactttaacaaccactgcatcagggcagagacctgcagccaggatcaggctttctaattattcccctcatcttggtcctgagaatcagcagctgggaggaaactgctcatggaggacacttactcaattgttctgcaattaattgagccttccttctcacccatccagtctactggggaaagctggtgatgggaataagaaatgagagaacaagatcccctgtgctcatggcttctaagcacacctttaccccactggaaggcttgaaccaagggatgtcaaattcttgccacttgccagttaaatcaatcaattcctcatggataggagtgactcagggtggaaagaatttgtgtttttctgttacaaattcagagactaaggaacatgggcctgctaatattttgtaagcatgattctctctccagtgcaatactcactccttcaagtttgggccttgttcacctctatatccctagccaagaactcgagtaataatttcaataaatacatgaatttaaagtgaatgaccattcagtcatcagcccttaatttctacattatacaaattttattgtttcacttcaccaaaatttacagtagaagctacggaaagattatatgtatgagattcgcgttgcttctttcttctgaagatctccaagttgtgcacatgaaaaacatttatgcaaaattaatcttattcatgttcttgctaatctgcaaagtcggaactatcatcagtgttggaaaatcgagaactttttttttttattatactttaagttctagggtacctgtgcacaacatgcaatgcagccaaaagacacatgagaacattttgaataagtaccaagtaccaaagaggctatttcaatttttgcaatttcacacaaaagccaagtgttttgggaatcataaagatcagtttctgtaaacctgtatagctcttaacacagcagtcaattccaagcaagggagtagaggctgggaaaatagaaaatagtcagaaaagactgcttttttaatagataaagggaaactatccacacaaggaaatgctactatcaaattggtgccaaataggaatatacaataaagaaattatttgaataatctgactaatagtatctctaagagctcttcctgacacactgtgaagagttaccattgaacaggaatcgtctataggaatgttacaggtgtcacaggagaggattgatagaattgaatctaaggaaatacacaaaaacatctagactgttactcaagccaaaactttggggatatgattaattttcaatccagatttaaggtaaattatctgacttgaactttgaacttatgatcagataaaaaattttgattgcctctatagtcattttttgctaagacaggcccaatgaacacgagatagaaaagcaaggtgagcaatagtagttaagactggttaaatattagcctgacttaattaattaaagctagatagtgatcctgtgaaaaggataaggcatgagtcaacaagcagaagtagtctatgagccagaatctcttaatgcactcaactaagtttgtggaaagcaagaatgatttcaggaccctaaagaagtattctgttgcagtagcctgcaagtgttaaacattgttgcatcattgaaatgtgtctttatctgatcacagatactaaaattaatcttcaatcatcttcaggattattatgcacatgctttactttcaagttcaactgcacatcttgctgattaattaaaccattcaatgtctgtttacacgtttcacaattttgtctaatactcactcaattttactgcccagaaggaggatgctaatttagaaacagaaaatactcatcaagaaaatataatttagaaagagaagaccagggacagaagaatcagttcaggtcagggctagttcaggtctaattctgagagatgatgctgggtgctcgggaggagcattagagaaaggatgggcagctgggtgtccaaacagctcaaccagaatttgatctccacaaaatgccctccattgttttctttgaaatagtgtggctgaaaaataatatcataaaagctcccattaaaatgtacatatgaaaaacacattaaaataaaaaattggctcttggaattatctctgccatttccacttgtattaagacagttaattgaggtcatattgtatttgttaacttattattttcacataattgtttatagagattaggagaaactatatacttaatagaaaatataaatgcttgcctgatagcagagggtcggtggagagaaaagtaacaaaacaaatggaaaaaagaaaaaagatggctcaaataaaatacttagtaaaaatgatttgaggccaagttaaaaaaaaatctggtgaatggctttttaaagatctaaagcaatttcaaaacctaagagaaaagagagagaaaaaatgatctagaaatagagcaaaatggaactagaaaaatactggcttgaaaatgtgaaactataaatctaaaattaaaacttccagatatatgttatagaaaatatttttttcctttttgtaaggagctaaggatttgggagtgagggggtaatcagactgtaagcaaaactaaagatgactaaaaagaaatgtgagggtataaaatacatgtattttttctttttggtaatgctttattaaatgttccaaagtaatgacctatagaaggcagacccttattttcaggaggtatctatgcctcaagagtctggggatgctctttcagatttgtcctacgagtctgctgcagggcattgttctatgcatggttctttaatttggggctgactcagtactcctatcactgcttatgaagctgggggagctgcagatcagcaggtactggcaaacctcagcaagagtccttttaagagccaaaaaatattggcctgaccccattgtgcgtcctgttatatacaactgagggaataaaacacacccagggattctggaaacaaaacagtatgaacactgcatctcatgagccctagtagataaagcactgagtaacactgtgaggtaaaagtaagttatgtccattagaggaccggcaggtaggcctccttccaagggccagttctgattcattcatggcggctgtctggagcacttctttgggaatgatgcctaggctaagtctcaaatcaaagggaaaaaaatactggaaaaaataaacttataatgcaggggtaatagaagtcattcttaacacatatttgtcactcctgagataaatagtatctagagagatttacttgtgttgctgatggaataacccaaaagtaattgtagtgagattaagcatatagtcccagaaagacatcatatacttatctacacacacacacacacacaaacacatgcacacacacttgtaacaagggatgcaggatacagtcacaggaaaacactttttttgtgaaaaatagcacacattagaatagatactttttttggtttatttaaaaattggttccttaataatcaactgcttgtagattagatttttctgtatttaaaaaaatagcttagggaagaaatccatttgtatatatacccaattatgtaaattacttaacatttacacaattatgtgaattacttccttactctcttcacaattaattatctctgcagccagctgtgtggggggctggcagctcctgttataacacagctgtttttcccacatttcagcagcactctcttccggtttgtcagggatcccagaaagaaaagttactctcattacaagaaatcttgagattttggttaaccacaaagaactaatggcctcattctaatgcacattccattgaaaaaacataaaaattcattagtaagacctacaaacattttgtcagtgcctatgttaaggcattttaaaaccctttgcaaaatcactattctaatctaattatacaatgatcccttattgctcaattttttactagtctatttaagtaggtttttatttgttatttgcatttcccatattacttaaaaagcagtagggcgagagaggccatggataaacctggcgtcacacataccggatgtatgtgcaattggaattcaccttctttctttaaaataccctggaaaggtagtttttgtttttaattttaaaaaaaatctcctttagcattgtttcttcttaaaattctgaggtaagaagacatataactgaaatgctcagtgtcacactgttactgcatgcttgtccctatttagttaccagacaagtacactgtttacaagtacagcaagccttagtagaaacatcaatatgggatgtgctcacattggcaagtgcataagagaactgacaggcctttgtgtatttgagttaatgacaagctgacagatagcatcttttcacctgtaattggacaacaaaaggaccagaagagagacaggctcccttgctagtgttccagcacctcatttgttagctgcctcgctctttaccattagggatataaggattaataccgcttgagtttttttctaatgtctacattatttttaagcctaaactatagaaacataaaactcaaaaggctgaaaaagaaggtttaattttcaaaattagtaatttctaaaaaaatctatgaatcaaccatggaaaaataaatttattcattccaaactaatctttcagtcatcatccaagaaagcaacgtctgccattgtagtcggagacattaagggaagattaacaggtaaagattactttcaatcagatatctttgttattgtcatcatcatcttcatgtagcctttaccaaatacctttctgtacatttcattaatagccaactgctgctttgggtattaattaacaaatcagaatattccacactgacagagagataaagaacgtgtagagaattgaaaaacatcaaatatatgggtcaaaaaggtaaagtgcacattcttattttatgaataggaaagtattgcaaaacggagagccatgagaattgttattttaattgggttcaagtttcagttaaacagtttttcttttctaactatagaaattttaaaaatagcttagtaatccttcaaaataaaattgtgttcacctatcattttaatggttaagaaactatccctgtagcacaatttagttagggcacagatagcaagaagctgtaaatgtgctaaaagggcttttcttttgggacagtaatggtttgactacaagcctcagcatattaaaaatataagggtttgtaacctgcttaaagaaggagaaaaaatagtttctgaaatggaatgagaaagggtcagaaacaaaaacaatctattttttaagagattggtttagaagaggcatgttatttagaaattattgttgcctgacaagaaaacactagaatagaaaaacagcactttttggcttatgggaggaaagctcacagggccattaaaattgaaaagttagtacatgcagatagaatggtcaagatgaggccagacttgctgccacagaggtcataaattattctcaaaaaaaaaaaaaaaaaaaaaccgggcaaataagatgaacaatatcactgacttccaagcttggtggccaagaacaagattctttgaaagaatgggttatttttaataatgataacaacaatggtagtttgtagtaaatgtttcaaatgcatcaggctccatgccaggagttttacatgcgctgtctcctgtaatcactgcaccaatctgatgtagtggtagactcataaacattacaatccacttttaaatatgggaaaacaggcttagtgaggttgcatagcttgactttggttacattctaagtttcagagacagtagttaactcttctttgattctacagctcttggatctgttctagttactgttccacattctctgagctatctactgcctttaaatgaaagtgaaatcctaagaagcacttgcaaaatgcagtgcaggaagaaggcacaggttgcctagtagttagtctcaagagaaatatgatcccagtagagttgacgcagtacagcaaactgcaaaacatatcagataaaaagaagagctttgactatgaaagcctttgactcagcaacataagtcagcaccagaaagggctctacgagacaagccagagatgagtgagaaacagaaacatgggcatagcagaatggcagccattcatatagaaatacatatctatttgaatttcaacttaagtaaacactggggtaacccaaagagtgatggtagcctacctattctgaaattttactgctagaaaagaccattggtctggcaaggaaaagtgcgggatcgaaaaatcaaatggcattaggcagttcaagcacaaagcctgaggtccgctctggccatttgtggcttttgctcaaatagaaattcctgaacttgcatagactcaaagtagtgtggtttagtgacttggtgaggattactttcgtttgattctgccagacctctaattcactaacatcattgtcctaagttccatgtggaaactcaggtacagagtggatttcttaggaagatgttgggatcatggaggagagaaattggaaaatgagtcgtgatcaaaatgctcttttttgaaagctattttatgacaccagactgcaagaattaaaatcacattaggatgtcagtagcaacatttacacactgcctaaaccagcaatggccacttttttcataatcatgaatccccattgcttctacagaatatgtttagacaatatatgtaggatatatatgtgtaagtcagtagatttgaaacattgtaacaatgattcctaaaattagagtattacaaaatagccctgagatctcaaaagcctaaacatttatgtaaaggcaacttctaatctcatttttaaagtttggtactttctattactgtgaaagaaatatggattggctatcaagggacttccaccactaatcaatattggacaaagatcatctcacttctctgtgtgtctatgtcttcacttttaaagtgagagagacaggctgagtgtttatactagaaaaagctttaatttcaaggaaatctgactagaatcccaacatggaaaaacagatgaaaacgggttcattcgttgaagcagagatgggggccggaaggaacgtaaggatgaaatggagggatgggggaaatggagaggtcagtgaaggtctgacaagtagaagcagcagtggcagtgacatagttaaactgggaaacaaacaggatgtggcaactggaaggcaggctgtctgaactagggattttggaagcagaccggtgttgcatcttaaggacagatggcaagggccagagtgtactggcatctgtggtgcagagaagacaatttgtgtgaaggaaaccacgtggctccggtgatgaatgggttgacatatggaattaagttggaaagagtgactgacctgatgcagaagattctggaaaggcagtgagtgacagcacaaggagggaaaaatggggtcaacttagcaccagcccccagcaaggagagggaagaaaaatttggaaatgacaatggaggaaaaagcagactgtgactcagtcccccagccctgagatgagtggatttgaaagagtcaacagtaaatcactgggagatccagaggggaacaggtgatgtcagttaagtcaatttcaaataattttcaaatttcaaataagaaaactcagaaagaactttctgagaagccattgggtttactgagtttaaagaagaaattctttctggaattactgaacggtagccgtgtttctcctccaggcattatccaatatcaacaagtttgagatttatagttggctcagattccattggtcggtcagggtggtgatgtgtgtggtatgtgtggtgtgttgcaggcagtgtgaaaggggtgtgagagaggaggtcagatctggtctcctgaaaaatcgcttacaggattataaaaaccactatgctcaagcatcacatataggtattcaaaaatgcatatgataaacatagataacttgatttttctcttgtgtattcagttgatatgctaaggcaataattttgatcaagagaaacacacaacagagccctaagtgaaaggtctgaaataatgttatgtcagttattaactgacaagaaaccagcaaatgtttataattggaagaaaaaaatcaatagttttttatgacaaagttcagcatcaaaatgatctggagactgccctacagaattaaaggctcataataccaagttgcatttctctgaaataaccaaatacaaatgcagtctccctctgccacttctctctgtctaagcaaatacacccactgcaaaaggaaccaaaggaacaagaaaactacatcgtaagtaccaaaaatgatgactttattgaacacctattgtacttactttgctttattatccacagctaatgccatgctccccccactcccacctcccatcttacccatcgaaagagtgaggcactgtaggaagggaacatgctttgctacatactattagataatatcatcagctggacagtattgacatctttacatacataaaataatgatcatagttgcattagaataaccacattagcaaaagatttaaaatgagataattgtacagggaaccatttaaaatggaatgattatattttaattttacatctgattgtgcaaaactgtaaatgcaaaccagaggctgtgtggagtagagaggaacatgaattcaccaacccgtggataattatcctttgtaaactccaaattcaaaggctaaacatttactacgcttcatgctctttgatcgtactctttaggcgaagaaagtgttgactgagcattgttccccagtaaggcttgtgaaaatcaaatacatttctgaactgtaaatacaatttcataggctaatagtcactaatagcttgtaattaatgaacagcatattaggtaaataaaccacgttgaaatttcagctgaagcttcatacttgaagggttctcctttcaattattctgaaggcagtgaagtctgtgtccccagattttttgggaatttgcttgcacattttaccatctaccatctcaaaactctcttccagttgctactttctccctccccattaaaacctgctttcaggaaaggatctaaaaatataatacacaatcagatagtccttgaattttaaatggtgcaacaagctttgtaccagtgaacagagcaatgcaatttagttgaaagacatagcagtgattttggagaaaggaagtgagagccatattggcctaggtttgagtccttgatttgttatttgctggatacatattcttgagaaattactcaatctttctgatctttaatttccttatttacaaaatggagataatcattcccaagacaactctagcttctgtggaactttgtgcatattggaaaagcctttccctccaggtagactcatcttcttgggttcatagatcatcaagaggagtgcagcctggatttgagccctatcatccctcaggcaaatgcctttattcagtacacaaacagtactagaatacatgacagccctgatgacagttaccttgctgggctgttaccatcatgaaaggaaatggtatatgtgaacatgccttatcactgggctatggcccagtcattactaattttttcaaagctattttcttacagttctttcatcttgtatttcataatcatacacacctgcatacatatacatcacttaataagttggataatacgtaaataataataaatttatgttaataagtaattcataaataataataaatgtacttgaaacagagcatggagcagggtgactacctttctcagggtaggtgcccacagaggcaagttgcttatcacttacagaaaggccaagtgtgattatctggtagagtcagtttatagtcaaggttaggtaggagcttctgctcagagtagatggtcctgggctcgaaatctatgtgtgtgacttattctagaaactattccataactcgaaagcaggctgctacagagttgtattattaatataatttggtagtgcccaaaaaactggagcctgaccgtctgggtcatttcctacctccatcactttgtgttgtatgactcaggccaggttgcttatctctgtttcagatacctcatctataaaatatgctaaaataaaataaataggagggaggaagaataacatctattgaggctgttgtgaagacttcatgcattaatttagacaaaggtttagaacagtgccttacacataatcagtgggaggtatgtgttcatcattgtcatcatcatcaccatcaccatcttcaccatcagtatcattattacaaaagcatcagcatcattacaatacttagcacagtactttattatttatgtaaccatgttttaaatgatggccctgttttctgatattattattttcctaacttatctgtatctctaatttttcttcaacaaatatgtatttctttggagtaaaaacaatagaatttacaataataaaatagtggttaaaattatcttggtgctaagaaataaatacaaagagatatcaaaaataatctcttctaccaagaatgtaaatatgtcgatggggagtcagagtatattataaacaaataaataggcagagtgtaaacagggattggattgaaggctgagctcagcttcttaccttgccctgcagccattttgaggctatactcactactttttctgtcttaccacttccaagatgtatctatctatctatctatctatctatctatctatctatcatctatctacctatctatctatctacctatctatctatgtatctgtctatctatcatctgtctaatagatatctagagatagagcaaaaggagatagagatagagggagaaagaacaggagagcatgagagagagaaagagaaatgttttgctaagtgttttgtgtcgatatggggaagagaagtcacatccacactggatagctccataataaaattctcatcatacatcctggtttttctttacttctttgcaccctcagaggctctttggctctttcctctatcttccccctacattctgtctcagaggttcatctatcataacgtcgaggcatcttggaaaatattcacacttttgcttctccatgttacacttcacttccccctcacctttccccaacttcaaaacctttatcgtttacagttctccatctctcattcaaggcttccttcacccaggctcattctaaccccacttccctaaattacacacttattatgtaaatgtgtaaactgtctattcagtcagtcctggtttttcatttattcaacacatatttattgagcaactactatgtaccaggcaccaagccaggaactatctgtctaattctaccccctgtccagtgtctagccaggtctaactctctgcctcctctggaactactatgtagcacttagtgtccacagaagctatcttagcctttaactgttttaggtgttgacattttcctaactggactctccttgcaagaaagagcttgtcatatatgtctaggtgttcagtctgtcatctagaatatatgctccactagggcaggaatgtgcattgtctgttttgttcctttgtgaagccaagtgctgggaaagtgtttattatatgactgatgcccagaaacattttctaaaatgatgaatgaatctccctcagcaactagcaggatgttaagcacgtattatttgctttcaatcaacaccaagacaactgagtgtttaacataaattatgagatttttccctaaatgtctacaaaactacataatttttgagcagttccaaaaaatactgtttttgtgcccaaggacatactaacagattcgagagtttccatgcagttgtggcaagaataactaggacaccattgctccttaaagatgaaagttcaccaatattttgaaaagtacaaataattaccaaatgaactcattcttctatacattatccacagcttatcagttgtatgcatggctcactgataggttctactttcaaggatttcattaattgtattacttggtgttactaacaacactgctcagtaatgatgacaatttgttgaccattaaagatagttgtttataatttacacactttagttagaatgctagaataatgctatcatttcataatcaagcattgtttgacacttaaaaaaactaggattttataaataactcagtgtataaagacaaaaaagtggagttgttctgatgatactggaagaaggagagtaaaaagagtgcagagccccacctgcttactacacctccttcatcttcacccaaggcatccccacctccacgtggcactaagcagaaccctacagtcatgcagaacacagttcaaattacactgaaccagcaccagcttcttacctaacaaagaagaaaggaatgtcaaagaggttaagagacctgccaaatttctttcatatccccataagggatgccggatctccagtccaggggtgtttccaccatgctataactgcccctaaaccaaggtcatcactgacagttggcattcttgcctaaattattccaggcattttcacacctccaaggagggaggcctacttccatcctactaggctagttttgattcctctctctactttcccttcggttttgaatctagtttttaggaaatgtcagattaccaactcgtttaacactttttttccatgacccttaaattgttctcctgaaacttccgtcatgaaggtagttagattagcacttagaggtgttctagcataatatttagtgcctatagaatgcttttcacctcaaaggcaactgtctacagggcaattttcatggatgaaagacgtaggcaaacagtcacatatgttggtgcatttataaagcagtttcatttaaagccccaaggccttaaatggtaccttgacaaacagatgtctattctttttattattattatacatttacacagacacacatcattagttctttattgacatcctgttttatttttatctggttttaatgctagctgtgaatgtcatcataaaactgtcttctagaatacctgctgatagggaagaggaaaaggatgaatcaaaacttggtaccatattggggaggagagccctcaggatccctgctgcctgcatgactgaacagcagatgaaacacactgaacgttccactgaacgttgagtcagtggaagatggagcttgcaaggctgtcttggagagtatcagtgctcccagcttagcattaaaatgcagcctggtggtcactggagttctcagctctgatgtctgaatgccacaggcctggggaaaaccccaggcctgtggctgctggagggaatgcaattagggcctctgagagagagaagaccaatatttaattggctcatcccaagttatctaccaacagttgggcttctctccttcaactcctgcctggttgatattactcagtttttggggttttttgtttgtttgttttttgttttttgtttttcaggttttttgctgtcatttttgttgtacttcatttttttccttaccattcaattttgcttttggaggaaagctctcaagaaagacactttcaggaccatccagattatctaatttcaatgactgactgaacttcaaatatgtaatttaggctttcccaagctgctcgatgatatgatgcagtgttgctttagactgtacattatttttcatatggtggaagtgtaatgtgaatcattctaatagctcctggcatcacatccacctactctctctctttgtgcaagtaatattcatgcatgtgagcagtgtgcatcaaagagcatataggaaatcacagtggaactgtggggatagcatggcttccacaaaagtcatataactgtagcttgcatccatagaaatacagtgcccactacaaggagaggttataaactggactgctccagtcaggctatatgtgtagctaagtgttaagttttgtccagacacattttaagatgggtattgaaatactgtcatttagaatacaatctgagttcttgtcctgtcctacatgagcttgtggtggggggctccccatgtgcattatcaggccatcttccaacactttccccctctgagcatcttttttttcctggctcaggtctagctcattctacccagggcctttcacttacaaagtcctcctgcttcaaaacctcttcctcttccatgctagttaattatccccattcaggtcttagagaaacctccctgatcatctgaaggcttgtcttctagtttcacacgtgcactgccacacacacacacacacacacacacacacacatcccttgtcactctcctatctccctttgtcattttcatcttggcacgaatcactctctgaaatgatcctctgtgtgtgtgtgtgtgtgtaacgcttatcttatcatctgattcctttgctcctctgtaagcctcatgagaggaggggccttcccttccttgtttctcaccatatcaccagctcctagagcagtgctgacacatggcaggaactcagtgattatctgttcaatgaatcataagtaaatgaagagagtatgtctggtgttggctgaccagggttgtgaagggacagaaggggcttatctgaaaaactactgaagcatagggaatttgagcctggaaaaagggagatttagagaagtcatgataattgtcctaaacaatttgagagaccgccacacagaagagggtgtggtgaggtcagaggcagggaatctgggcacgtactgttcagcccttgttagggagaacattatggcaaatagagttcttgaaaaggaagggcttctttgtaatatagtgctttctggaaatgtgaaatattcaggggaaaagcttgaagtaactgtctggtgtagaaggtaattccattttggaaataagaatatatgggagttatagatgagagaaaattgattcttgaagaaagattacttattctaattcttcactcaatgaaagaatcaaagagtaagagaggtaaaatgttttgtcccaaggtgtagcaaacactgttggctgactaatcccacacctattccccaaattattgtctcttactcattttcaacatagagtgtgggaatgctaaaaactaatttccctagtttctcttgcacttggggtggccactgagataattctagcccatgagaagtaaatgaaggacagtggggacttctaagatatctttgctttcttgatgaagaaacagggtggctattgctgtctctcattctgcttcttgaactggaagtggatgtgagggaaggagttactgtagtcattttgtgaccattagagaagcactgagatgctgcctctaacattgtattgaaccaaggccagcatctgactccttttagacttccttatttgttttaaaagactgtcagtggggttttcttgcagccaaaagcattcctgactgacacacagatattacagaaagtggcaaagtttagattaattttatatttcctaatgctcaggcaggtagatttttcattacatatactaactcatttgtcaactattattaaatgcctactgtgttccagtcacagggctaggacctggggaatttgttggggtcactggcaatacaaaaatctatcatgctagaaaggaaacactagtgaagacatgattacaattcaatgagatgagggctatgacagaggaatacacgggacaccaggacaacagagaagcccaagttccaaagtgggaacagagagagcatcctcaaaaatgacatctacttagagttaagacttaaataaacagtagaagttaaccagattgggggaggtaaaggactctctaggcagaaagagattgtagtgcagagagcaaggtccactcaagaagctgcgaagagtttggcaagactgaaactccgtgtgtgtgcaggaagggggctgcagagagatgaagtgggaggtgtcaaaaggtgaatctggagggataagtaggagccaggtaagaaaagggtttcctttgcctaggtgatatgttggaatggtttctaggaataggtgctaggaagttattgaaggttcaaaagtagggaaatgactgatcagattggcatttcagagtgatcaccctggtttccaggtggaacatgcacaggaggggaggggttgttaaggtgcttcaagactgaaagtcagggaggtgagttcggaggcagagatggtgggacttgaaattttagaggacatcttcaaaatgttaagaaggcagaagtgaaatgacttggggatcattaggtagagagtctaatgcagagtcaagagtgactgaaaggatgataccacctatccaaacttagggaaatatcacacctcctcaagactttagtgtattccatgtgtagagtctgttttctattcctaaatctactgccctagaaaaagtaccaatgaaataaaacgtgaagtgatttgagcaccaagtgggaaactggggattccttaactgggatgctgattttcatatgttaatattttttccaaatgtacttcctcatattttaagtggaatatgaatttcctagaaattttacaataattttgtattatgtaaagatagttgaataaaatagtccctgttgctagtaatcataaagataaatttaatttccactggccacataataatttgtctcattatcttatagtcacagcttgtacacatataataatgtcaccaaatgtcacttaaaataatatttttctttttaaatgttaaaatgattcttttcagttagtctaacaaaagcttttttaaactcacattcacattttcaaatataaagtgagtttcagtagtacctgtgtttcattgctaaacttttgaattctgcttttttccttaatgataaaactagcatcacaatgattacttctcatctatattcataaatgtacctaatggctacactggccaaatagctaacataatttcaatttctagaaaacaacatttctagaccacatcctccccaaaatattttttaaatgatttcttatattttttgctcacatttcactaattgtataaaaaatataaaatttatttatttatttttttacctcaggaaacatatggtgtaaatgcttaaggaaatgtgagtcatgtctttgatgaggcaactactaaaaaatcagttccttctgctacaatataaatagcatgataagccctatcaaaggtcaaaatctaattttaaaatacgtatttcaagaatttttattttagccatcttgccatgaattagaaatatggtctgttcagtggccaactctgacattttctagtgcacttgcttttcagtttttggagcaagagagaggaaatacattttgttatatttcaactcaaagatctctgagatattgcagagccaaaaaaaaatcatctctatccattccctaccctactcccccccagaaaaatcctttcacctcccaaacaatttctaaaaatacatttttcttttttgttaactgctctcttgaaacttgaagatgtgtctgaaggatttggttgtcaatgttacttatttctaagttcccatctggttctcaaaaaactctttcctcctcttcctaagtgaacacctctgaaagttgtaatggatttggcagtaggcaagctgcctatgtttataactctgagcacacaggtgatgtcacctatgataaacagcacttggcacctctagccatctctgtctaactgtgagcttcaagtccactgggtgcttgggaaggagagctgattaaataccccatccaggaaggagctagattgacagacaagagttcagcctacttgcttgcatgctacttgcaattgagacctgtgacaagaatggaattttgctcccctcaatttttagatataagaaaattgaggtagagggaggttaattgctttaatgcctccataatttaaacactagatttcttgctcaatgtttagtgatgaaacatatcagagtaggtctgttatactcaccacccttggctgaagctggacttcatttccactgactgatccccttgtttgtacagatcatgcgcagctaattcctgagcttgtttttcaacctctcaaacacctggagtacaaaatttgattccttcaaagagactgctcaaattcatttgtttttgcaagtaccatgaatagttttttaattaattattattataagagaatacatatttattgtggcaaattttagaactaagaaaagggacaaagaatctctaactcatccatactttctcacccagagatatccatggctaacagatggatgtatttacttctagtcttttaagatatgcatatatatttccaaaactgatactatgttatataaacacatatcctgattttcccatttaatattttacggtatgcagttttccattttttaatatttcaaatattctttgtaaacaggtattttaataattgcataatagagtatgcataggccattaaacctagcagtgcatgatctggccaggtcagcattccagccttagcctcagacactggaaattgctatcctgtcatttaggcctccttcatatatctggttcttcctgcctggaaaatccttccttgtggtaggcacaattttaagatggcccccaagattctatcctctacatgcatgtcctatatgatctccttctcttatatgtgagcctaatcacgaacaggatgaacagtcactcccatgattaggttattatgtatggagaaggtggagggattttgctgatgtaattaaggatctcaaatcagttgatttttgagttaaccaaaaatggcaattattttgggtgggcctgactgaatcagaagaacatccataaggaggagttgggcccttcctgaagaggaacattctcttgctggtcttgaagtaagtggccacgttgtgagaggatctgccaaaggatgaggaactgcaggtggcctcaaggggctgagagctgccccaggctggtgatcagcaagaaagtgggaacttcggtcctaaaaccacagcaactaaattctgccaacaacttgaaggagcttgaaagaggaccctgagccccagacatgaatgccatctgcaaacacctgatgtcagcctcttgagactctgatacgcacctgactcctgacccagggaaaacatgagataatgaatggtgctttaagccactgagttagtggtagtttctgacccagcaatagaaaaccaatgcattccctttctcttttcctctggtaacttccactcagctttcaggtctgagctgtgagatcacttccttcaaggagccatccctggcgccacctatatattgtcccagctcatttttacttcttccatgaacagcaatcacagatagaatggcagttgcctattttctcacctgcatgtctcttgcatgataaacaagtgtggatactgagcctcagagaggtgaagttctatttgtttgatggctaaaatatattgggacatctcaggaaatagcaacacatgtgaatacaatgcaaacttaaatttagcagatttgccaacacaagacgtggctggaacaaaaatacagtaaatttaccataatgtgtaacatttaatgtattgtctgaaaccaatttcagataatactactgaagcaaatttcatcgaataattcatgtgtgcattagctgtgtggatatggaacctgattctatatacaatttacggccttgtcagtttttatgtaaaaatcacttagagtgaataaaactgcctatttatggtaatttctcatttatggattacttctgaagaaaacacacagttcttttccctgggtttcaaagcctggttagccaacaggatcccagaagcagttatgtgctggagctgagtgactcatctgggagattacagtaggtgagcatgctctacatgctaattgcgtcaagctgaaaccattcagatattaggaataaaagcaaatagaagggtgatattttaattctgcactaaagataggggttaaaataataactcagctaaaatagatacaaaagcccaatgactccctgctttttttaggatgagtaagggaaaaaactaaattaaaaatcactagattatatgcaaaactgcctgtttatttaccttaccgatggtggtactggacacacactgaaaaggttagcattaattggcttttgataaggacaaaattctgcattttcagcactgctggactgatgagttagaattacagtatttcctaaaactcatcagttccctctaattgggtctgcccaggagaagagctgtcagatcggagaagaattcaataattctcaagctttgtttcataaaaaccacccgggatgcttgtgttaatgttcctattcccaagcctttccgtagaaattctgactccttaggtttgaggtggggccttatcatatatgttttaaataagcccccaagatgattttgatacaggtagtttagctcttacattttcagaaccatcgagtagaccatttaagatatttgtcatcattgattctcagaagacttgctcctaagaccagaagatatttgcctggtgtctgctctgcctgagaaaacatcttcaatgtgcatggggtcctgtaatgcatatgaggagtagagagctcctgggcctgcagcggacaagtagggtgcaaaggctgaaacgtcacatggagaccccagtgaattagagtcacctaaagaaaagccaccatttaatgtgcagcattcttggtaggtgggaatgtgagcagggtgttgccagatttgctgttttctagagaaacagaaaacatgaatttttgtgtaaactccctcgattttttaaaaaacactgggttttaaaaataaaatctgtaattggagcaagggctgcgagttttcaacctctgccttaactcatcaggataattctccataaaatttgagaaatggcagagcctatttcgttgacagaggtggtgacatgagaacaggaatatgaactccatgggtgagagatggaagggaatacccaggcacacaaggctgctcaaggaaagacaattgagctgccttttcatacaactcggcgctgtgaggaggaagtgttttctagtgtccagaatatgaaacctgtaaaaattggatttattcttcctcctcctccttctcttctgcaaagggttttcagatattcattcccattgtatctcacacctaatcacccatgaacctgcggagtaggtcaactcaaggttggatctacaatattttaaaatgctataaagtagatttcagtccctgagttgaattcaacctcattcttcaggctggccaataactgacagggtctttggctgtgcagaatgctaagtgtgaggtgtacggggagggtaccagttcaggtaaggctacatgccagactgttagctgtgttccagggataacaggaacctttcttttttaccagtcaaattcttcacgagtcatggtaccttttagaaatattagaaaccatctaaacctctcaaatatcaaactacttttcttcctgaagtgtcagtttcttctgaacatgttctttgtttttggagaaaatcctggagagcactgataattcccaaattaggcaaacaaccaggaaaacctctataatctgagcccagtaactccatatggcaaatttgacagaagtctgctctgaaagtcctgcctgaaaccattggcctgcgccaagttatagaaaaatcatggcaatgccaattcctctgctccaaaaccactaagatcaaatactattttgagcttctcagcacagcttttttactgtgaatatcataaatacaaaaatatatctgctatgcggggcaggaaggttcaagtatttcattatgtttcttatttcataacatataattgagatcttcatgattacaatgggatatttctaaatccattggtgagcattataaagagcaattcttcaaaagaaagcaaggcttagctgaactgtgaacatgtttttgacgataaaaatctggctggttttatccctaaagctatttttttattttaaaagctttaaaaaataagagtcactggtcacctaattgcataaagaaaagaccctctagtgatagtttatgcctttgggatatctgataggtcaaattatctaatgcttgtacttatcttgtttattgtaatttcaagtgaatttagtgcttaaaaaagttaatgtaatgacagaaggtgttctgacaactcacctgtttcattgtcttcatagcactcctgttgtttgagcattatcattgctagttgcattaaatccattatttttggtgtgccaatatttagttaaaatatacacacacatatattaggacatgtctgtctttatgtaagtttttgcagccactaaaaatgatgttcacaaaaaaattttaatgacatagcaaaatacctttctaatgcgattaaatgcagattatcaaactgcatgtatctatgtatatgtagaaaataaaggaaaatatatcacagttttaacaataaataacctataataacggtattaagagtgagtaaagcacatcaaaactacaatgagacaccacttcataccccttaagagggctaatataggaagtatttttaaaagaagataatgcatccattagaatagaaatatcagctgtaaagtgttcaaaaacactgggttttaaaaataaaatccgtaaccggggtaagggctgcaagttttcaacctctgccttaactcatcaggataattctccataaaatttgagaaatggcagaacctatttcgttgactgaggtggtgacatgacaacaggaatatgaactccatgggtgagagatggaagggaatacccaggcacacaaggctgctcaaggaaagacaattgagctgccttttcatacaactcggcgctgtgaggaggaagtgttttctagtgtccagaatatgaaacctgtaaaaattgtttttttacagatatacaactgtttaaaatctaaaatgtattaaattcatgtctttttgcagtaggcaggtgggataaataagataaaagactcattaatcattcatttaaacatttggtttaaatagtcatctggaaaactaaaaaaaattatagaatgctttttcaagaaaaaaatcattatttaatagagatcatcttgagtacggaatgatgttgaaactgttttattttatatgattttgagttattgaacaatgactgatgataaaaataaaaatttaaagaaacaagagcaacaaagagacatgaagttttaatatttccagtaaaacataaataacttgtaaagaaaaggagatcatgtagaaatgtgctctgtgttcatgaaattcattgtttatatccacaggctcctagaaaatatgagtgtcccctgtgagctgcactcatctctattatttatatgttttattgacttgttttaaaaagtacaaagatgagcctcagcctgattttcctaaaggtcaaatttcttaaattaccatcagtgagttttttttttttaaatcatacatggacaaaagagagttcacagtttggtgcctgacgttttctattgtttttgtcccttatttattttgttttgtttttaagagataatttctgaagtgtctaatgcataaaaatgttttgaaactcttctgtaaaactcaatttttgttatagtttgaagttggatgacatggaatttttaaagttaggctgggtgctatgatttgttgctaaaagcaagtagtattgaaaacacaatatttaggcagtgttctcattgtctgggtactatacatatgggcagttgatatatttacttggtaatatgaagccaataagctggtcatgagactggaaagaagtttggaaaggaagaggggggcaaaatataactatatccatactagagatttgcattgattaacgtgttgattagccagcagtttgacatatccaaacttcctttgtcccaggagaaataaatcaaatgtcagattttcaacttcctccctctactctttaacacgtacatactgacacatgcacacacacacatatttaaaaaaataaaattcaactgatttggtcagacacactgaaaactggttaatagattagaataatcaaagttgttatttttaagctagttgcatagagaataacaaagagggttacgccagaacctccaaacttttcttgagtctatgtttttaatcattatgcacatcgggttaggagtgcccatttgtaaaatgagcatggtaataagatttaccacaaagggttgttataagaataaaattgaactatccaatgtgtgatttagcactgtggctgcctcgattttaggacttgcatagtcactattatctgtcgttcttatttcaggcaaagagaacaggaaaagaaaaggcatagagacgtgaaattgcttaggatgttttggggaaacattaagaggtccagcatgactgaaatacaaaaatagttgggggaggtgaaggggaatgaaagggatgacgccagagatggtacagattatgtcctcaagtgcctttacctgcagggttataaccgtgggaggagtcatggctttaaggaggctatttgaagcgttttgaaagggatgacattggaaacaaggacaggacttataaagctaccgcagaggtccaataggagatgagaacttgagtagactatggcagtgggcatgacagagaatggaaatattccagaaatctctttcctttagttttttaaatatttgttttgttgttgttaactgaggttaacaagaaagcccagatgatatttgcctcctgctattcatggtgcctcctatattgcatcaggattgcccaacagaatagggcagaagcaatgatgtgtaacttttgaagttgggtcctataacacattgctgctttcctctcatcctctttgatctctccatccaatgtaaatcagcaaccatgttatgaagacactcatgcagcctggagagcatttcatttgcggaagaaatgagacctgcctgcaacagccaataccaacttgatcatgtgagtaaatcaccttagaagcacatcctccagccccagtcaagcctttatatttctatcaccctgactgacttcttaactgcaacttcatatgagtgccaaagccataaccactgaagaaagatgcttctgaattcttgacccatagaaactgagaagttagttatgctattgttttaagccactaagttttggggtaattaattaccccataagagtaaactaacagagattgatcttatttgcacatagacctggtatgttagacagattctaagattcccatctcctcatgttcaggccttgtgtaatttccacttctgaagtgtggatagaatctgtgaatactacgagataccactcctttgattctgtttttttcagatataattaaggttactaaacagctggctttgagttaataaaaaggactattttgctggtgggccagatataatcatataaaacctttaaatctgggtttagaggtcagggtcaaatgaagtcagagaacccaagcagtaggaagattcttctgttggccttgaaggagtaaactgccatattgtgaagagggttacgcagtacagaatggcaggtggtctctaggaacaccagtctgtcagtcacaagtgactgaattctgccaacaacctggatgagcttgaaagagaaccctcagctccacataaggaccgcagccatggctaacaccttggtttcaacctcgagctaagaacccagctaccctttgcccacacttctgacctacagaggtgtgacatgtaaatgggtgttatcttaagctgctacattttttaaattatttgttagacagcaaagaaaactagtacacctggcttagatgataagatcttggacttcgagctgatgccataatagaatgagactcttgggaaccacaataaagggagtatgttttgcatgtgagatggaagtaaatcactgagggccagaaagcagtcttcttcactggtagccagcctccaagatggcacccaatatgatcctactcatctctgggaattcattcttttctgtagtcccttcctcactctcacattgcgtagggctgacctatgtgaaaaaaaggatacgttgggaatgacattgtgtgacttttgaggctctatcataaaagacattgcagcttccaccttaatctcctatggatcacgcacactttgtgaaacagcccacaaaccatgaagatccttaagctgccccatggagaagaccacccaacaaagaattgaagtctccccccaacagcaggcactaatgtgccagccatgtgagggagccatcttggaagtgaatcttccagctctagtcaagtattcagaagaatgcagtcctgatgtatatgactgtaatatcatgagagagtcagctataatcacccagctaagtttctcttaaattactacagacctaaagaaactgtgggcataataaaatttcattattgttttaagctgctaaattttgggtatatgcagcaataggtaactaattaagaggtgtataagacagtttctaaaaattgagtcccctctccaggttatagtggacaatcagtttgcaacagaaaaagagacaggaataaaaaaaaaaagagtcgttcagtagtattttaggggaggtttccagataagcacaggctaaatctgtggttcttgttcccatagttaatagattatatgtctctgattaaaaaagtgatggctaaagacaaaagactttgacaactggaccagatgaaaagattaagagttctctctctgggctcttctccttaacaccttgattatatttaacactcccttaacacctttctttatatgtcttgtacaaaaacagcagcaaaatagaagaaaaatccttttagaccaaataatgacaaagtggaaacacatgcctcttagacacaatgaaaatcgtgatatgaaggactcctctgtactgtagaacagtggctgtattctgggaggaggaatttaaatgccatacagaagtgtaacttcgactctgctaatttttcactgaatttcaagagaaatttaatgtctgtaaaattagattggaaatatagaggccatacaaattcacaatttgagattgaaaataagcaaataagtttagaagggagtcttaaatgtaatttgttctggttataaaaatcctaaagctaattataaaaattttgaaataaaaaagtgaagaatataaaatttatccataatccccatatttagagctaactactcttttcagtttcctatgcatatgttataaattgaaatatttctgccattaaaattttatattttcgtctaatttaactagcattaataaaataatttccctgtgctattaaaattatttttaagctatatctaagtgccacttttaacagtctttaaactataaatgtatgctcaatgttaaaatcaaagaggcagggcagaaacaggcaaaaatttgggaaaaacataacccagaattaacattcacttttagtgtaccagcttccaatcttaaaaatatacatgttacacatttgcatacacatttgcaaaaatgacatgctatgtatactgagtttatcttgctcttttttggtttcaattaaaaaattcaataaaaatattgtttacaacatgatttaatgggtgcctagtattctatcatatggacataatttacatatttatgaatagttcccattatggtacagtttggtggttttctttaatgaaaattttgaacatgtatcatttcagttttagattaattccttaggataacttctcaaaagtataattattgggtgaaaaatgtatgcataaattcatagtgatagatatagccaaagaatttcccataaatattgttgcaatgtatatcttaaccaagatgaaagcagatccttttctccttcactggttatgagcgctttctcatttttagagaaatctgatagactggagatggcatcttggttgttttcacttgcatgtcttttatgagtagtaaaactaattttttcatgttatcttgacattttttacatgcccacctattaatgtcttatatctattgaaaatcattacatttatccttttattgtcttgtaaaacctgtttctatgttaaatttatcaactctttgtctatgcatataatttttttcaatttgtgacttcctttttaattatcttcattccttttcaagtaaattaaattttaaaacatatatgtactcaaatatgtcagtattttccctaatgatttcttcctttgaagttgtgcttagagggtatcaccctaaacatccaatattatataagcattgaggatattttcctctgaatttatgtggatttgatttttataggtggttctttaaaactctgtatctgaaccttatcttgaaataatatgtgagattagaatctcacttttatcccagtagtattatttaaaagcaaaggtattgcacaattaatacagtcaccctatataatagagacaagtaaaaagaaaaaaaatgccaactctaatgtgagttattaacatttattcaccctctctcccactcagcctctctcaagttgtcttgcttgaaggtgtgtgttggcaggaatgggggacagccatgtatgccaggcaccgaacacagcagctttacatgtttgtatttaattctcgactagacttgtgaggtagaaattactctgtttcaaagatgagaaaggagggacttggagaaatcagaatgctggagattatagagttcagagcctggcaaatttgagtgtgtatatgagttcctggtaatgttgccaaaatgcgggctctgatccagtaagtctagaaggggcctgagattctcccttctaaccagctccctggcaatgctgatgcaaatggtctgtggaccatactttcagtagcaaagacaaagatgacaattaaataatggaacttgatgtacccctaggtctttggacttctgtttctttccacactatcacgcttcctctagctgctgtcaacacatgtgtgcttgtacttttaacaaggttccatcctaaaacaaagtcaaacttcttaagcctcacttttatttacaaagatacacgtaataacaaatatttaagaaatctgaaagtcaaaatgagtgatgaaaagaaatttagaaggaaaacctcaagagtgtatgtcacaaaaatgttccaagcatgctctccaagggaacttgtgaaaatccattactaaaattaatttttaagaccagaggattatatcccacagaaaaaccagaagggtagaaattttcatagttcatatttaataatctacccattctctaaatatgaaacattcacaattattgctcaggccaatgcctactgtgaatgtttttgaaataagagcattctagtctcataattttatatcctcaatgtattcttaggaggcaggaagaagaaattattgccattcagtatgagactaactttttttgaaggcaagcctgaaaagaaagagcatttcttcacacaaatacatatttttgattcacataattattatatctacagaagacttaatttgaactcaataaaaatgatcattttaaactatgagtcaagtattctacgatattgcccttggattgaacaaaaattacatatgatgcaggcaatctttttttctggtttgttcactaaaatatgacaactataagacatattacagcttaggactagagaatctaaagagaattaccctccaaaaatgagatgacaatccgatgtgaaaagtagactgaatgtagagctcataattctacttcaataccactatttcctagtaatagataagaatcatatcatttttagctggaaaaaaatcttagagatcattgaattcaccccttgctcttgttaatgactttgctattgcctttatttatagaagtggaagataagtggtatttctcttttggcattggaattctacacacagacatggttttgctcttccagcttactgagccattctgatgttcatacttacaatacaggcgaagagaagactattacaaaggatcattttagtggaaaagaaagtcagaattaaatatctcactaatctataaaaaattatttctgtaggtgcatgtttctctcatcaatgtgtacgacagttaaatgcataaatctcccacacatcaatggaaaaataaatctcgtagtgatgagcacatgacagatttcttttcagaatacgggaaaatacacagtcacagtggctgcaagtaattttgtaattgccttactctattaccgacacggcatctgctcaatgctctgagaccttttcctctcatcactgaattttgcatttaatttgcataatgtgtcaaagaaagaaaataatggatctggctgaactttcaactgaagtaaatcatggggaagcaatgcagaagcagacatctctctagaaatgcattaaaatacaagggaagtcaacaaggagtcttaaaatgctcatttccaagtactgaaattgcattttttcaaacttttacatgaaagctaaaatgttagtcctctttttaaaatattctttcaaaagcttatatttcaaagaaaatgagtattagtccttttttttctacaacccacccacttggtaaaaggcactagataaggccctaagcatcacagatttggaaatacaaggaatgggatgatgaactaacttcagcattgattatgtcacatacaagagtcctggttgcccaaacaatctcttcgtcatctgccagcttctaaatcttattcccgaatttagattcatgaaatgccccgcaagtgtgcaaagtcagcaatcagccgagagcctacaccaagtgcaccaccttggtcatgtgtgctaaagctacagatctacatctcccttatgcccttggtcaatctgggtttacacatcacgcatttgtccagagcaggggatacctgtaacttgcttggtatggagaataatattctattgttatcacttttgttgtactttctgataaatcacctttatctctttaactggtttatgggtgatggactagcaccttcctaactccagataagtcattttttattcctcttttcaagatgctagctcccagaatacatcaaagactcttatattttcaaaatatatgaaaaagaatacttgaattttttcacctcaaatttcatctctgaatatcacaaagggagggattataaataaattatgactaaaaccttccaggtttatttccctgatgagcaagttatttctgaatcagtattgatttttttgtgtgaactatcaaccactacctttagaactagtaacattttggaagatgaaactggaagacatttctcaatgagtttgatgcaccaataaatttatcagccagactctgtttctaagattcataaaatttactccaaggaatacaggtgaggaagagctaaaaaaatctataacatcaaatgagaactcattaactagatactcaaatgataagaattgaagaaatataagggagagagggagaaatggaggaaaggagggagagcagaaggaaggaaggtgggaaggaaggaaggaaggaaagaaggaaggggggagggaaggggggagggaggaaagcacataggcagtcaggaagtagggagaatggaaggaaggaaggagagatgaaggaaggaaggaaggaaggaagtagcgagggagggagggagtagggaggcatgcaggcaggcaggaagtcaagcaggtaggctgggttgtttccatatgggactctttctatgcaaagacaaatatttcaatgattctgagttttactttggctcatgatataaaattggtgcatttcataggtatgtgagtatctgagaggtgaatgagtgttcttagacacttgggcagcagctgaagctcacctggcattcctacttgatgctctcatagttcaagtctcaactatggtgattatttggagcaaagggactggagggcctagaatttccctgtatcctacctctctgtggtaggatgtatcatctggccccaaatccctactccttgcatctatgtattcattctgagccctcccatcaagggtgggaggacctgccccactgcttgtctttgccctcattcacgggatgtcagtaactgtcatgacagagacttgaaaatgtgcttttgtgttgggcttgttttcttccacctcttccatctccacgagaagaacacacccaggcaagctcatcagtcccagaagaaagatgagagagaatgtggaatggagatgcgccagctcacatagatgtctgattctatctgacactcacataactatccataagttcaacatagatcaaccaaacaccagttgcccctcagatttgttaaaaataataaataatttcttgttttaagccacagtgatagctaatatattttccttttgccttcatggtgggatctaacaaaattagtcaatatctttcaaattagagaaaatgggtaccagtctcaaggggatttctttggtctttgtcaaatattcactcagataaaataataacaagaatgaatgtaagtttttacaagagactctcacggaggaactactatacgctggttgatattgaatagaggctccagaacaaacactgcacaagtactgaagcaacatgggaatttatgctttgttggtaaagcaataattcttgcaaattcactagtgttattcacaaagacactaaaagcatctgtttgtttaaattgatagccattataatctttagtaagtatttgtttttccaaaacaactaagaagtgaacatctttcatttcctagggagaaacaattcaagcaaaatttcaggctaatacctgacaaacaataacctattttccagaaattgccacttagttgttttcttaaagacatgagaggtgcctctcatttcctcagctctgccttttctgcttcctaaaggacagttcgctatgtttgatgtaaaaataggcagtgtaggtgtatagagggtggtttctaatggtcatacttcaccattcatctgatttctaccatttccttctcctgacaaggagttcttaggcctccgacagaaatccatgtatagagggttcaaaggtaattccaaacagttcacatgataataaggttagtaaccctcccctaaactcatagcaacatgtgtcatttgtctttataaggtaagattattctctggttttttaaaagtatgtctaatgatgtgctttttgaagaacaggataataaccaactaaattttcaccaaatttcctaaaaattgactgaaattgactccttttgtgagtgttaaaaggatatgaatttacatttccactgctggataataaaatggtgtgatgagctgtaccatggtgagattctacacaagtgaggcactcatgaaagtggtacttggagcccaaggtaatcagggaagatgagctcctgagtgtggatataagagcttatcagtttggttctttgttcctagatttcaagattgatatgatcaagtttacaaattggtcctctaaaagtacaatggctaatgctaaggatgggtgtgcagggattgtagttggaagaggcccacagactcttaaacagaatttgggaagaaagggatatttgacagttgaattggagtttattgagttatacattgctccattttcattggcatagtaaaaaggttaaaggagaaatcaacaagatattagggatagctataaggacccgtcgagtaaggtgattttcccagtgatttggggataatgggtcacatttcctaaaaaataatggctctcatggctttttactgtgagaatggataggttgagcaaggataacaagaatcagcctggggcccatggagatggatgctgtgaagtagatggatgcataaacttgaaaatttgagacactgaaataagtcacttgttattgattatcttcatgaaaatgatgccattggatgtaattaagagcactttcttcttaattgaggaattctgtgatgagataggtagtcttcaccttgttccacatacatgcaccccactaagtgatttttttctaaatatattatacaatagggaactgttattttacttattgaagttaatagctactattgtaataatttagtgacaacatttgtgctaattgctgagcagaatatttaaatgaatcacttttaaaatatatacttgcaagatgaaaataggtttaaatcctaaaagaccacattctaataaaaacactgaaaatgaaatctgagaatcacatttaactggcttttagtcacaaagtaagcagaaataataagcataaacataattgcaaataaaatataaaccgaaggtcctccaaagaatccaaactacagtattctttctcattcaagatactaccctacttaataccacataaattatcattagtttctgataaatgctaacataaccttgttgttcgaactttttttttttaattatttttattttttatttttttagatggagtctcgctctgttgcccaggctggagtgcaatggtacgaccttggctcactgcaacctctgcctcccgggttcaagcgattctcctgactcagcctcccaagtggctgggattacaggcacccgaacaccacacctagataattttttttttttttttgtatttttactagagatggagtttcgccatgttggccaggctggtttcgaactcctgacctctggtgatccacccgcctcagcctcccaaagtgctgggattacaggcatgagccactgcgcccggcccaaacttttgaatacagataaagcaatacagaagctgtgggttatttgttttgataaagacaataacctatatttaatttagcaacatttttagcagaaatttaagaatcaataagcctaattttttttaactccagcaacaatttaatgagtcacctaatttattttcagcaaagcctaacaaagcctcagctggaggagtttccaagcgaattgttagccagttaatagagaaaaatgctaaaataggtcattgacataggtagacttctacttctacacaacattctctgaatttcccctattccccccaaactaccagttcagttcagtaattacatggagcaaccattcgaaacaatgggaaaacaatcaatttgagtgtctcttcaattatatggagaaaaagagaggagaggagtagcgctctacttttcagaaaatttgcattcctgttctatggttaatgttcattttttttcccccagctctcatctcacagtgttggacaaaaacttcaccctgtgaaaacacatattaccaaggactgtatttggacatttgcattgcagttccttggggaggatcattgttaaatatgcagattctcaaaataaaggatggaaaactttgtggatatggagccccaaatctgcgtttataaaaattctgttaaagctttgtgaaatcaggactgttttcctgcagatcagaggcttaaaagaaaacaacagctggcaaaggcctgagtagggccagccttaggcaaattgtgaagcagtccaaatttagagtttttatctctcagttcatttgagagtttacttagaacaacttgcttgtcctcctgtgccagtgctattggcctctcttctcactgcccaggggaccactcaacaccaccctccaatcagctgagcatcccaaatgcagtctccttactcctgagtgttaatgcctaactggccgctcctactcttccaggacattcccaaggctacatcctatgccatcaaaaccatttctatacctcaggggcctactccataaggctggacgtttcaccagctaacacattttaagttatcaacctgtttgctttttaaaaataatatttataatttttattccaaaataatgcttgcttaaaacaaaataattagaaaactaagaaagaaagaaggaaaaagtcatatctaatcccatttgtcatgcgtatcctcagcttaccctgacctctaagatacatatgtacaaattcatgtattgtgtgggtgtgcgaactcacacacaggcatgtgaagggcagtgtgttggtttagttcctacctctggaaccagactggctgactgtgatgctagttttgccacctttgccaggtcacttaaccactctacacctcaatctccacgtctgtaaaatggggatgctaataagacctatcacagcgtagttttgagcatgagtgtaggcatggttagccacagtatgtgctgtggttagcacatgcacactagaatcagctacctgaatttgaatcccagctcaataactagcagattttttttcctgcggaaaagtttcttaatatctctgtgcctcaatttccttatctgtaatataagaagctcaattgggtaatgacaaataaaaagtcagatgacaagcagttttacagcttctgtgttattggaattaaaagggcaacggaaaattacaaactaatgatatgagatgaatttgacatttctattcttgggctattaggacttctggactaagattaactttcatattattgttttaattataaaagaaaaagcagtatattttctagggaggaagaaggtaaactcttatcgtgttcttaagggatccatgacccaagcaacattaagaactgctagggcattagatgatcttcttgctccaacattcaataattttacattttatgctacctattttgaaaatctacttccttaattttttaacttgaatgacatcaaatgtactccaaagtagcatttctaatactaaattccatgagactctagtgtctgtctaggtactcataaatagagtgccagaatttggaaaaataatcccagagtatattttccttttatcaaaatcagataccatgatggcccattatttatatatgtgaataatactattaactttttgttttgttaatttcttactatttttttttctaatttaggactaagacaacattttagaagaaaaatgattttctatagtcctaaagagttctaaatcactacttcaaaaatcatgaaatagaaaatttcgaatgaagcaccgaatatcttttaacttcagtttgaaaagaataaacttttctctatgaaggctagtcagttcactgaaacaaccattggactgagtttttgttttaggcatgatggtacttctatctacatgttaattctccagcatttatctgaatttatgctctaagtatgcatgtttgttttggtattgatctctgtccattgacctgagctctgatggaaatgatagcaaacatgagatgtcttttagttccctaagtaccagatatttttagtttaggattttttttaacataacttatgtttgtgatggttttggcactgtgacgaggggagcccttttgccagtcctgaaaaatctccattgttttaaaaatatccctccatgccattgatgaaatccaaaagaacttcaaggatgaaagggacgatgcagcttcaaaaccctgactggctccctggaaggctgagtcactgagcagtgccctgcgtgtagtattcatgggaacagcacacagcacagcatcattcttctgagctggcagggagctgaaattaactgaaatatccacatcttggaggctcttcagaaaaggatttgctttctgttcaataacctcatggttcaagcagtgcagtcatgggcattagtgcgatgtgcgggtagacattctccttagatgtcttagatgaaacccttggagtccaggggatgctgagcagtggtcagctggtagtctgaaaccttatagaattaaaagctttaactggacctagtaggagctaatattttcaaatacccacacaagttcaaaaatatgacaatttttgcaattgaaatcgtaaatgtgttggctattatttctttctttggctgtaacctgcatgtaaaagagattttctgtgaattgactctaacaaatgcttttaaacacctgtctgattaatcaacacattaaaatagtgtcttcctaaaaataaaccagctctatttttatttcacttgccctttaccctctcaccaataattattcaatgttggctaataattaattgcaatgtaaaagggcatttcactatgcttagcaaagagctgggtatatgtatagaatgcctgacgtgtgcctatgaatagttagggaagattgccctctgagtttgaatgtgttatttttggtggtgttatttcctgtgtagctctatggaaataacaaacccaacagactggcagtacctttcacccttagatgcctgtggagcgtgcccttgggataacgattacagacatgccctgtagcacttgttcctttgtaccacaggaaagacatggggctacagagaggagttgctgctagaggctgatacatgatgtcactccaccaggttccccagtggacctactcagagcacggtaggatgctgacaggcctgctctggaggactgcagtgcccagcacagcagcagacagtctcagtgagtagcctgagatttagcaattcccacaccaggtcacctaagactctttctgggacaggctcagccaagaataataactaccttgttatcaggaaagggcagcaagccttttctgtgaaatagcctagtattctctacatttctttctgggagtgaatttgcaagatttttacagaaataaaggagaacatctgatgcccaaactaggtggctcttaaaacttaagggagcaatttggtgcaaaacaatgtttagaattcttcaatagattaaacataaaaggaagatgaatttaactggaagatgtctcacctgtttttcgaaaactgtatgagtaacgaatatattttggtaattctcccatgtagtgtaaatattcacaataacttaaagtctgtaaatgtaatttagattttcaggattaaatcccagttgagctaaaactgattaactgaaaaacagaggtgccccttaggtttcttctggtggtttactcagggacccactgccacagccttttgtagagccaagagaaatgtgtagcctaggttcttccccaaacccagcaactcaatgacaaatctagcagaaatgtcaccataatattctgactaaagcttcagaagacactattttgagacagagtgagtatattgtatctaaattgtcaggtctttgtacgctcatatttatttagtaatttcactttcctttttatatcccatttcagatagtggtcatttactatagtaataatgatgacaaactattatttattgagtgctgacttatatatttgatttcatgtacattattttaatcctcccactaaaatgtaagttctgctattaccactgatgaggaaactgagtcagagatacaaagggacatgaaagacatgtaactatagtaaagtgtgtggtgcaaacaatccaacctaagtcattctgacaggtgattgctgctagaacgctttgcctccagcactgttaaaacaactggattcctttaagccctgactatgatcttttaattctgaaatactatgaaaatgtaatttgctaataatttactgtggattaagtatatgagtaagaaagcttattaaatcaacagttctagtttcagtctctactatcttctcaatcatttgtgtcttgttttttatagaagttttcagtaagcaatgacaactgtatgttgacagaaaaccattcttaaaatttgcagcagacaggactcctatacatacttctttttttgtttattgaaaatcttattatctggattctctctcattatactttcatttctacaatattttcaccttggcacagagacataaatattaaaaccagaagatcacattctagtaaaagaaataatggtgtttccatcactgagaataagtgctttttcatatatattgcaaattccaaaaatgtctcgggaaatgagttaaggaaggaattgcttattccatcacaaagaaaatctcaaacaaaataaatttacataagaaagtacatgaagactgggtgtggtggctcactcctgtaatcctagcactccggaaggctggggcaggaggatcacttgagcccaggagtttgaggtgacagtgaactatgatgatgccactgcactccagcctgggcaacagagcaagattttgtctgtaaaaaaataaaaataaaaataaaggaaagtacatgaagatgcagcaaagctctggtatcagtaatattctgaaatagaaacagccattccttcctgtagaaagtctgtcttgagtttgaggagtctctggaggatgtatgatgggcaaagctgaagttgtcacgatctgcctaatcaagtgtctcttcaacagtgtccatggggattacacaatgtctaatgaagttttaggatgatttgttagactaagccttccatcagacagagttctttcattaattatgattccaccctagagactaactaagcaatatgtcccaatcttaataaaagtcctcctgagcacgtatgaatttataaagtagaaagtaaaagctgtttccactttttgaagataatttgcaaactggaagtcagactagatggcacaggtcacctatatctgggagcctaaagatgattataatttcagaggataagaaaggaagcttacttaattgagatgtgtagagagagaagggtatgaagccaggagaacgagatgtgacccttgatcccagagaagaagatcttcaagagtcacttctatgacctggcaatggttcaaagatactttgtatgaaatgaggacacatttttggaaactaatgagcttcaatgaaaaagagatgaacatatttttcgacttcagctaaaaaaaaaagattaacttccttaataaaaataaaattaaaactgcaattagacattgctttcacttatttaaatggtaaatattaaaattttataatgcaatctattaaaaagtatactgagaaaaagcaaaaatagtcatgtgagggtaagtttggtgtaatttttttcagaacaatctactaaaatccttttaaaaaatatgtatttccttcctttgacttgggaattccacctccaaatattaattctagagatatatttactttacatgaacaaataagtaaaagaatagtcatcactacactgtaggtagtgacaaaggatgggaaacaatccaacagactccaacaggagtctggtgaaattatgtctcatccagatcatggacgatactgcaattgctaaaagcactatggcagatttgcatgcagagttaggaatcaatctccttgctatatcattagggaagataagcaggaagcagaatatgatatattatgtcttagcatttgagtaaacacataaaagatctccattaggaaatacaagagtagcagttgcctccaggaaagggaattggataattgagaactaaagaggggtttactggtcatgagtatcttttgatactgaagatcgtgtgcttgtatcatcgagtcaacccaattaatcaattgatcttttagaaaagactggaaagaaaaggtatctaaaacggtcaggttgcaaagtcaagtaaaattgtgtcaataaaatggctcggagaagtgattctcaaatatctgggtatcagaatctctttatagtcttaaaaattattgaagactcacagatttcttgtttatgtggaatatttgccatcttaaaactgagacaattataaatatttatttactaattcattttcaaaaaatataataaatttattttcggtaaaaataactattttccaaaaaactgtgagaagagtgacaatgttttttatttgtgccacctaatggaagacatctaggttctcatgtctgcttccgtattcaatctgttatgaaataatatgcatcacattgtatagcttctggagaactctgctgagaaaatgtacagtgaaaattacaaatgacatgttggtgttattatgaaaatatgtatggtctcacagacccctaagagaatcctggggaccaccctctatgagccccttagaataaaaatagaactttgcaactgaattgccattagagaaaaaagatcactttctttagctgaagttcactttctagtattctctaactccatcagtaatgtctaactgtcctaaaacatgagttcataaagctcaaagaaggcaacggtgcctgataaaaacaatcttctaggaacgacagtttaccaagtttagttctcctgcgaaataatactagcaaaatgttctttgtgtaatgtagtttctcacactggctaaacaagattatctttcagaaaataaaattctagctctaacagattcatattttaatttaagaaataccaaactatttcccatctcctctaaaactatcatagtcatattattcaacctctgtagaatgggaaatgcagcatctaagaaagcatcttttgtaaggggctaacaaaagttgtaattaatgtagtaaataacagtagtttatcctttcagcacatttttattgaattcactttatgttcatttattgtgctctgggttgatgatagagtggtcagaaaaacaagcctgcaacctgccttcatggagctgacgatctggctaatagacattaatgaaaaaaatctcataagctgctatggatgaaataaaactacagtaagctctgagagtccctaacagggccaactggcaagatttggagaatcagagacacataatcagaaaaagggagatttgaactgagaaacaggagaagtagggggttaataggcagtgacggtagggtttggaggtattattcagtgtagaggaaacagtatgcataaaaactccaaggcaggagtgagtatggtggtttccaagtgctgaattaggtcaaaatcagccaaataatagagagtgatgtcacgaatgatacaagatgtgctgtcaatatacacatgcatcagatcatgcagattcctgaatgccatggtaaggatttccatatttataatgagagcaacagggagctgttgaaaggtattacagacacttgtttgtgtttttgttggcatgtttaccggatgcaagatgaggtggccttgcatctagcataatggttcgttttctcgtaattaccagttgaaagtgaacctcaccacctgcttgtttgaggttcaaacaatagtccttgacctcaatcagcaaagtggaatataacatttcaggtcctcaaagtgagttttaaagtgaaattttcttactatctgctatcaaaaacttcaggaaaagtgaattttcaggattattacctaagatatctaaggaatgtcagcatccctccaatcctctggttctaaaagttttatgtaagagtgagttaataaccagaactgtccatgctaggaaagtaatagtatggcatttgaatcacctgcccggagtccagcttcaacattctagccttggcttctaataaaatttgttataagaaagaatgctatgatagatacttctggatttgttgcccacataccattagggcaaggtctgttatctggaattttccataaagtctcatgtggtaaaaaacattgctggaattttgtacccaagacaacatgtttttccctaaggaacatttcttcttttgcattaatgagagcaaattatttaataaattgccacattggcccaaccttgatagagttaaaacaagttaaacagaattaactatgatggctcttatgctttctttcctttgcttcattccaacaatatattttgctcataccaaatcaacttaaattctatttcataagctctctctaattcttttacaaagtgatatgtggaaacatatataaatgtaacaaatgcacatgttcagttttaagaagtacactcgatatatcctcaaaagctgaaaaaataagttcaatgggacaatttcattcattacagactccttttcttttaacgttgctaaaagcttaaaagacatgaaagcataaatatttatttgtatcactgtaagaatgactgaccactacataaaattggaaaagaatgcatgcctaagaagggactacttaccttattgatatagttttcattacaaaaatcaggctggtggcatcaaacatgtgggccatggcctcactccaaactgctgaagctcatttgggatcacaaacgatttgctaaagcctcaccactgctgccaagacagggagattgtactgaaatgtacatttcagagccaaatttagtgctttcttggctacgaaaggtgaagccaggacagcagaaaggaaacctaacaatgggaagacaggaccctggagtaacttcaggaaaaactaatccaagtaagaaggcatgggatgtgcagttgccgcttgttttgggatacatgtaattcattttttaagttattaactacacacataaatacacactcacacatatacctgcataaacatagaacacgattgtggtgggcagaattctaagatgatctccaatagctcaggcccttacactatctcctcccagatggtcaacatctgtaattttcttttaaccagtggaatatggcaaagttaaaggattgttcaaatgtaattagcatccttaatcagttgactttaagttaatcaaaggttattcagggttggtctggtctaagcaagtgattagctctccaaaaaatggcctagaagtcagaagtcagagtttctttctcctgctgaccttgaagaaacaagcttcaaggaattttacagtggttaagaaattgattctgccaacagccacctgatatggaaaaaggagccagaacctcaaatgagaccccaatcctggccaacacctttcttaaagccttttgagaccctgaacagaaaacccagctaagtcaagtgcagtctcctgacccatggaaactgtaaagtaacaaatgtgtattgttttaagatgctaattttgttgtgatttgttatgctacaatagaaaataatataatgatgtttggtgctgtgtgaaaggtaccatgctgaaagcatacacttcggttgcttaattagtacaacttcagtatttgaatataacctaagaaaaatcaatgggtattgacaaacacacaaatacacaaatgtatacatccatacacactgaaatttgccatcaagggagaaaaagccaacttgttttcattacctacaccctcaaatttacttcatcttttgtcaaactcatcttagttaaaggcaaattttttcatttttggactagttggacaattctaggtccagctagaaacctcggggtcatcactgactacttactgcccctcatcccttctaacaaattggtcaccaaatcgtactacttccttttgattctttttcatcccactctttaactcaatctctactgccactcatgagctcttctttctaccaaacaatgcttctatctgatttatctgttcatagattccccacctcaactccaccaagcccacgacttccctttcagtcttagaggtgctccctaggtcaatgggaaggaagtgaaggaagtcaagtagaactaaacttggcgacgatgggagaagaaaggctagagatcagataacagacatgcctaggaaatgatagatgagtttactgaccttgttatggattctgagcattatcctgtaaacaatgcaaaaccactgatggattcacaacagaagagttacacacacacacacacacacacacacacacacacacacaagagcacacaggcacacacacagcatagtctttccttgcaggaaattattcctaatttggaaatgaaggttctttcacaaatcagcaagttttttgcaataaaaagctacttaccaactctgcaaacttggatatagtcaaatcattttttccaactttttattgtggtaaaaatacacataaaatttactatcttaacaatttgataatcataatttttggtaaacagaatttggaatctgagataataatcatgactgtatagaccctgcatagtaatggttcaattgaacttagttctagttctttctcctcccttttgctaacagtgaaacatcaaacaatattcatcttgcccattaatattgaagtaaaacttgctgaggcagtttggtctcagggagtgtgcacatttaaataccaaaaagttaacatctacctagaagctagagaacaaagttagaaaacaaagaaacaatagggaatatttttgcctttgggtaattcagtagtactgatcagtaggaaaaaaaactcctactgactggtaagaaatgccatagaatatgggtacgctcaatgaaaatggaaggtttttttcatatgccacctctattttcaccctcttagatacaacgaaacaattagagactgcatgtcttcatctctgaatgtgcttgtgcgcaaaatggctatgtctaaccagatactctgcatttacattgtgaaaggtacctttctggggctgaaacgctatacttttccccttccttcatttcttgtccctcctcatgtatacaaaacagtgtttggagaaaagaaatatatactacatagagtcaagtcattaagtctaattccaattctctagttcgtggtttcaaaggaaaaattctgaaaatttaagcagagatcaagagaacattcttctaattttctgtacccagatgacacagatttttaagggatgacacagtcagggggatgactgggcagatcttgaagcaatctggtagtcacatggaatcagccttttttaaggccacactcacattttggggctgtaattgtttgaacagcgtagaaaagtgtcagagctgctaactgcacagctcaccagatgcaggagtgggatttgccactccaactatgcagaagcttggattgagccaagaatctggaaggagacaatatgagaggctttccttctccaaggcttaaaagggcatgagattctattaggctgaaccatgtgaaattagcaatattttacaacttttacctatgaagttggttcgacacagtacattgcagaaatgaagagggagaatgtgctttaaaatactggtgtaataaatcatacatgtctctaaaccaaaacaataaaagtacataagcagaaaaatactctatacgatgatagaatcaacaggccatggcgttttacattcgctttcaactctgctgggtatgtttttgaaaactagtgacttatgccaatacttccattctaaccaatattcttaaaaatcaaaaagagttgttgaaattttgaaaaaccaagtaatctagtaatacaaaacagctttctattgttaataattgcatatataagaagcaagatttaagctaggcatggtggctcacacctgtaatctcagcactgtgagagactgaggtgggaggactgcttgagccaggggttcaagatcagtctgggtaacatggtgataccttgtctctacagaaaaatttttttttaaaaaaatggccgagtatgatggctccctacgcaggaggctgaggcagtaggatcctttgagccctggaattcaaagtagcagtgagccataatcatgccactgcaccccagcctgagtgacagagtgagacctcatctctgaagaaaaaagtaagatttagagttggtgagtccagtgagatgttacttttcacataatgtcccttcactctacttctcaacatctccatggtatttgcacaaacgtgaatattctcattgcattattggaaattttatcacatcaattccttttgacaccatgaataaaactgaaatatgaatactggagaattctaatgtgtgccagaagagaacttcaacttctataaaaaagtgttcttattgaggaaacaattttcacttaacaagactgtagataatagagttataactcaagagtgatgatattcattaaagaaaatagacctgtgtttctttactctctctactggttatgatttcttatccattttaaaaaaaaataaagtattgggagaatacaaagtaatattatatgtaaaaaagaaccagcaatactgtaccctttcctcacacaaagaaaatatttgcttcggaactgggttcttgccttgactatgtcaattatcacagtttttctcccttacattcaatcatcccaaggaatttccaacctgacttggtgactccctcctccctttcatatagatgggactaatggagcattaatctgactgtgaaatgattcaatttcaatttttctaacctgaggctataattatttttcttcttagaccagtaagcaatgagtcattaaagagaaattctgtggggcagaggtcccatctgaggtccaatctgataagtgcacagggtacaaaagtttgcagatatcctccttttccaggcaatgcagaaaaatcctggtatctggtaagcttctctttccatatattaattattaaggatcccacttataatatctacagattctctgctcttttagtgatatataaatcatggaataagactatccaagataaactgtcctttgttcagagttcacatttcaaatgaacacaagaaggaatctgtggctgggcatggtggctcatgcctgtaatcccagcactttgggaggccgaggcgggcggatcacgaggtcaagagattgataccatcctggccaacatggtgaaatcccatctctactagaaataacaaaaattagctggacgtgatggcactcgcctgtagtcccagctactcgggaggctgaggcaggagaatctcttgaacccaggagacagaggttgcagtgagccgagattgcgccactgcactccagcctcgtgaccaagtgagacctccgtctcaaaaaaaaaaaaaaaaaaaaaaaaaaaaaagaaggaatctgtatcctgcttgaaaaaggacagagtgagaattcctccttaggtcccatcactgactcctcttttcctccttgcactttaaatggtgcacctctggcttccatccttgagcttttccccactggcatcccttatttaggtgttctttctgatgctcatcatattttcctagtaacttccaaccaatccacactattctctcaattcttctgagttcctaaaatctgatatattgaaagaacctgaactttggagtcataaaaattctagcattagccataaaaaaagaacaagatcatgtcttatgcagggacatgaatggagctggaggccattatccttagcaaattaatacagaaacagaaaaacagataccacatgttctcacttagaggtgggagctaaatgatgagaacacatgggcacatagaggggaatggcacacactggggcctattggaggctggagggtgggaggagggagaggatcaagaaaaataactaatagatgctaggcttaatacctgggtgatgaaataatcgctacaacaagcccccatgacacatgtttgcctatgtaacaaacctgcatatcctgcacatgtacactgagcttaaaaggacaacaacaacatatatattctataacttttctaagttccattttccaggtctgcatctagagaaaagggtatattttccacggtctgttgaaaagattaagtgaactgtgatctgtgcaaagcttctaggagtaccaagcctcacaaattaataaatgatagtgctgaggaaatatgataatgatgatgatagtgatggtgatgatgatgatgacaataatctactgaacatttctatttgtgtgttcactagcaaactcttcagctttcctcccctgacctggtaagtgctaccatcactcacccagttggctgagtacataccttaagatttccatctctttattctttatccacctgcctttttctaattgattgctaagaatggacaaacctagcctaataatatcaacctatttattccactgctctaagttatgactctatctgctatactggatttttatcataatgtctcaactggactccccccaccttctgtcttgctttatttttattccccttctatgctactacaagaggaatctttctagaggacattgattatgtttctcttcaacttaaaactcttctatatgaggaacaattgggatagtgtatgtcaatgcactatgaaaaagtctttttaaataatgatctataaatggctatctcagtaatattatcttaggaagatgtagaagtttttatctcatagaaagggaaaattactgttgcatacttatcctaatactaagatgaagggaaaggaaaaggataggacaacaacaacaaaaatacatagtaattgtcctacacattaatggtattatgaaaacaaatatttagagccaaaaatgcatacatagaaccacaaaatatgaaaatatatataaaatcctggtttgagagcaagtatctttgcttataccatatttacaactctacatgaaaacacaataccttgattctaagaaaatgaaaaattaaagaattattcttgtcaggtgtgggtcttaagaatagtcatcctagagaaacaagcaaaagaaagactatgaagtgtttattgttgttgctgttttgttttgcctgcatgttcgtttggttgtttgtaagaggtatatcaaatgcaaaggcttgttaagtgtgattaacagattattatggtgtctatgcagatagaattagccagaggcaaaagcacatggcagagatttttaaaaacatacaattgataaaaaggataaaaaagcttaaacaataaacatacatgttcataagtgcagcaatccaccatggcacatgtatatctatgtaacaaacctacacattcagcacatgtatgccagaacctaaaaaaaaaaaaaaaaaaaaagaagaagaacaaaaaaaaagcttagataagtttgcagggcatggtgggtcactcctgtaatcccagcactttgggaggcggagcttgagcccaggagttcaagagcagcctgggcaacacgtgaaacctcatctccggaaacttcatctccacaaaaaaatacaaaaattagctgggcattggtggcacacaactctggtcctagctacttgggaggctgaggtgggaggatcagctaagcccgggacaaggaggttgcagtgagccaagatcgcgccactgcactccagcctgagtgacaaagcaagattctgccaaaaaaaagagaaagaaaagtttagacaagtttccaaaaggttttaaagataaagcaaaaaaaggataattttgcaataacacacagcaccactccccaaactcacccctcaacccccgacacacaaacatccacacatcagtgtttgaagaatttccagtgatagatgggtacagaaataattaagattagaaaaccaaagctggaaaggctggtgtagtagcttcctagttagagagagagggcagaacaggggaaggagggaaatgactgaaaaagaaagttcatttgtctttatgatgttaccaagtaggaagtagtttgaagtgttagttttcatctttttcagatgagttgagaaaaccaatttaactaaattaatgcaattaattagtggtgacctgaaatgcaatatatctacctatgctttcacaatcaaaaagcatttgttatgcttcacatattgacacaagtgatctatccacaacactgcaaatttcctctgcagatgagcgttttcaaatgtttgccttacccaatatttcaaactttcccccactcaaacaagctaaaaattacaaagaacaaaggaaaacaaaactgcaagattttaaatttaccttaggtgtccaaatacttatggatttttatttatttacttacttactattttttcaaatacaggtgggatgttgctatattgcccaggctagtcttgaactcctgggctcaagcaattcgcccacctcggcctcccaaagtgctgagattacaggtatgagcaaccatgcctggccatggattcattaattgtactttttggaaatacatgtaatttaaaaattattttatctaatagcattaagtcagtcagtcgacaggatctatcatttccacttttaaaaaaaacctctcttaaattcatctctttactgccatgtccatcctttactgccacagcatcagtttcagactatcaccatttatttctcatctggtttactgcaataaacacctaaatcacacctttaatttcttcccactccatggtctacatatctaccgaagtaagtttttttttttttttttttttttttttttgagacagagtctcgctctgtcgcccaggctggaatgcagtgacgcgatctcggctcactgcaagctccgcctcctgggttcacgccattctcctgcctcagcctcccaaatagctgggattacaggtgcctgccaccacgcccggctaattttgtgtgtgtttttagtagagacggggtttcaccatgttagccaggatggtctcgatctcctgacctcgtgatccgctctcctcggcctcccaaagtgctgggattacaggcgtgagccaccgcgcccggccctaccaaagtaagttttaaaaaattcaaaactatccacataatttccctgcttaaaaccaatcagtgcctctgtaacatcttatagggaagttaaggaatctttagcaaagccttatttcctcttcttgcttttccttaccagccccatcctccacagccggaactccgtatatattgaactactctcttaggctactgtcttggaaaatactaaccattagatactacagtttttaactatctacttaaacaatttctactgtttaataatcagatggcagttatattctgttaaactactagtgcacatttgaggacattatcgttgtatttccgtttggtcttctatcatttgaaatttgtaatttgtttgcatttatttttcataggcagatttgtataatagaagatccaaaatactcattaattaactacatcaaatatttaaagcaaatgcttagacacaaacggcatccaaagcaataaaaaggctgccagactgcttgagggccaacactgctatatgttattgtttttgggtttttttgttgttttttgagacgaaagtctcgctctgtcacccaggctggagtgcagtggcgcaatctctgcccactgcaacctccgctccccgggtttaagcgattctcctgcctcagtctcctgagtagctgggattacaggtgcacaccaccacgtccagctaatttttgtatttttagtagagacagggtttcaccatgttggtcaggctggtctcaaactcctaaccttgtgatccaccagctttggcctcccaaagtgctggcattgcaagcgtgagccactgctcctggcctgttattgcttttctacatactcccactatgtcctcattatctactttatgggttcaaacatttctgattttttttttctttgagacaggtctcactcttttgcccaggctggattgcgcagcacagcaggagcatagctcactgtaaccttgaacccctgggctcaagcgatcctcctaccccagcctcctgagtaggtgggaccaatcagaggtgcacgccaccacacccagctaattattgtattttttgtagagacagggttttggtctgttgtccaggctggtctggagatcctgagctcaagtaataatcccgcctcggcctcctaaagtacggcgattacaggtgtgagccactgtgcctggcctgaaatttttcatgagttacaaaaagatgtagtgacaaaaattcaaaggggtatcttgttcattattgtcaagtcaataatctaatttggtcgaatcagttaaaacaatctctggggaaatattacattgaacatgcttgacaaagttacttcagtggcccatcttgttatctcttaaacctagctaaggagatagaaatgtttaaaagaaagcatttttgatatgtgacatcacaaagcacactacctcttcaccatgttttgtataattagtaagacatataatcattatgtttgagctcattggaaatgaaatcacattctaccagggagtaaatggcaatgcacttgagtctggggtcctcatgtcatgactgccactaaaaacaaacagacataaattgttttccctaaatacatttttttctgaaatattgctatagtgagattattgagtgtgtatgtgacctgttattactggttttttattttttgtgaaatatttcatgtttataaaatattccatgtcaacagaagtaatgactatctaacagcttccacatcttactacccccaaaataaaaataatacataaagttaaaaaggagcatttatgaaattataagtgccattttgccaggatgatgatacatactcttcttcttatgaatgttaaggttagtagaccattttgaattggcaattattttctcagtcaagaaatttatttatttttacttttgggtcttaatgtcatgcagaactaccagatgccaataacaggagtagctgtgggcattttatatatgtttaaaccaagctaacagaatgaattgagccagagtatttataatttattaataaatgttaaataatgcataaacactaaaataatcataagacaaaacacaaaataacattgaaattagtatctaatgtccttattatcatttttttatttgccgtctccttaaatataactctcctgcaacatcatcatcctggcaatccatggtgccacttcttcaatgacttcctgtcctttaggtttatttccagaggtgatatttgcatttgtaaactgaagtgtcttttacataaaataaattgtatagttattttttaactctttaataaaataaagcacatggtaaaggttgtctgaatttggagttgttttctacttacttttaacagtatattcctaacttcataaaattggtaaccctggagttcaattatttattaataattctttcagttcaagcaatgtacaaatactgtgtttgaatgtgagaaaaattgacagagtcattattttcataggagtttatagtttggtgaaagaaattggccttatcaataattatacaattaaacatgtaattgaaaatataataaacaatataaaggagcactatatggtattatgacaggtttgggagatctgaaaatacttcaccaaaagaagtgatgcttgaatcaagatctgaagtatgagtaggtgttataaaacactaatgggtgtggaggaaaaggcatttcaggcagaggaaacaagacataaagaagcacataattcaacacaaagtttggcctatcccattgaagccatgaacatccttctgtttctcacaaactgtgggtctgttgatttatttggatatttcagctatttatggcagtttctgagttaatataagtatgggtttcttagaaccatattctacatgaggggcatcattatactctattacttctcaaacatctgataagaacagggtatttatccatgttggatgatctttcttcagtgtctgtagtagcagctgccgtgatgagtaaccacatgatttctggacagtagagacccctgcctactgatcattagacaagaaactggtcctcaataaaactgaaaacccaggtggtgggaatgattgagtggtagtaaaataaaaatgtgtgtatagaagagtccaaacttttactttatgttttaatgatttaaaaatgcttccaagtgagctggaagcacacctgcatactaggtaatattgttatcatgaatttggacaatctcgatagactaaaaatgtattactctaattgctttcagagagaagggctgtgagtaaattattctaaaacatcaacctcatttttggtaagtaacttctaacatttaactggcttatatttaaatgtgtcaatccatgtatttaatggggctacattttgcaactagattatcttggtgcattcaactggaagtggatatgttataaatatcgagacaatggggtgttcatgtcagaaaatcagaaagctggataccaacactgaattctcctttccttctttttttttttttttttaagaaaaaataccagaggatcactctgttgctcatgatggagttcagtggcgcgatcttggctcactgcaatctctgcctcccagggtcaagcaattctcgtgtctcagcctcttgagtagctgggattacaggcacgtgtcaccatgcctggataaattttgtattttttggtagagacagggtttcgccatgttggccaggctaatcttgaattcctggcctcaagtgatctgcccgtcttggcctcccaaagtgttgggattacaggcgtgagccaagatgcccagcctctcttattcctttggttccattctatcacaaataaggaagacccaatttgggctggtgtcccagaattctgagccacacttgagaattaggttgggcttgcttgagggctacagttacaggaacagagcaggtcaaaaaagcaatatttgagcaagaaactaaaataagaccttagtttttaatcttaaggaccagagaacacatacagcatccaaatcaaattcgggtattcaggtgagaacaagaggctgaacgtgggatacaggagagtgagtctagaagaattttccaagttgaagaatgcagcttcttttaatggtgcacacttagtgttcagtcttaaagagaatgccctgttaagaatgctaactggggctccagtgctgatagattttcaatgaatggaacttagacaacaggccatcaatgtgtagttttataagaatcagtcacagttataagaaacatttatatctatttcaaactttatgaagtatagaaaaaatgttgaaactgcacacaccatatcacatagcatcttttttataaaacaccacagagaaatatttcttttaattctcagagttaatagcaatatattttaccaagcaactcattttttaacttaccgatatatgaatcttaaagcaacagtgttcccttccttggattagttgataggaagatcagaaccagtctgtgactcgtttctagcaattactcaggaattaatgaaatgaatttttgctttcatagttcatactattttcatgccattttctcttctctttgatgtcctcatgtttatcttttactaaatttttttatgaaacgcaatcctttgctttttttgggggggtaagaaacaagtgaaatacaagtgaaatatattaaacgaaataagttgaaaatattgttttacaaaaggagaaaatacatgatttttgcttattataaaaacaacacatgctcattttaaaggaaattgagtaagagaagagaacataaaacaaaatcaaagacctctcaaaatatcctctcttcacacacctgtaacagtttggtggtttttcctgcttagacagaatatatatgtattctctctctctgtctttgtctctctctctctacatatatatgtagtactgtctctgtctctgtctctctctcactctacatatatatgtatatagatataaatacacacacacatatatatatacacacacataccacacatacacctacatacataactataggcacacatgtacatagacataatctcatatatgtaaatataagcatgcatgaaaacacactggtaaatgataccatattctgtcatctattctctaaattgctttttccacataacaacttgtagagtttaaaataacatttcaataatttcaatacatacagatctcaatacagatatatcatcatttattttacaatttctgtcctgaaagatatttgggtggtttccagatgtatactattatatgtaatattgcaatatagtatttctttgctcacttattcaattatattcttaggctaagtttctaaacatagaattaatgggacaaaagtatgcacattaaaatattgatatatattatttgatcacccaccaatgttttcctgatttatacttcctgatttcctgatatattgttcactgaaaatgtacataagaaagtggctatgtctgtataccatctcaaattcttttaaatttttcatctttttccaaaatgatagatgaaaaattgtttcagtttttatttctttgtctgtcaggtagaaaaacttttcaaatgtatatttgtcatacatttttcttcctttttgaattttctgttcatggcctttatctgtttttctcttgagtttttaatcttttttatccagtgctctttattatagtatgaatgaagtaatgatcattttttatttccataaaccattaaacaatttatcctatattaaataatttatccttttctcactgatttggactgctacctttactaaaccctaaattttcaatatatgcatgggccttattcttgaccatttatccagttggttgaataattggtttatttctaaattattatcatgctgtttgaattaatagcctatatgatatgttctgctatcttataaggaaaaacagtctttttattttttcaaaatgttctttactatccttatatttaaattaaattttaagtcaagtaatcccctaaaatcccactggggattgtcatttttaaataagcctctgaccttatctgtctgaagtgttgcatttttctaaaatcccatttcaaactgcttactttcagccaccccaacgataatcttactccattagtatactatgttctcataatttttcccttagtgaagcagtcaataacttagctttagaacacagtgccttaaattttgtggataaaagactcattgagaattggataaacattctctaagaaatgtgtgcctacctccaaatgtaatgaatcttgtagagccacataacccaaggttaagaatttactctgtagaggcacttctctaaatttacaaagggggctttatcccatcagagttattttcactcttacatgttgtttttttttcataagttagatcaaaactgttatttctcttcataatattataatttcactctgtcttcataatcttaactcaaattataggctgcttctcctcataccaacctatactcacagtatctcttgtttcattacattacaataaaaaagatcactagacctttttggctcaagtccaagttctatctttgaacatgaatatgtgtctatttttctgagattcaatattcccttccatcatctataaaatgggtaaaataatcactaactctgtgtgtttcaaagagattattaagaaaatcaaatatatcctgtctgagagagcacaaactaaaaagacaaggtttcattattatttccacatttaaaagctcaccacttattaaaaatctatataaaaccattcactgtgcaaggtcctaacatacctaatgggggaaacacataaaacaaataattaaactgcaattgataactgctagagtacaaataatatacgaaagctatgggaaagcccagaaaagaaaaatattcccactttgggagatcgaggcagatggatgacgaggtcaagcgtttcagaccagcctggccaacacagtgaaaccccgtctctactaaaaatacgaaaaattagccggacatggtggcaggcgcctgtagtcccagctactcgggaggctgaggcaggagaatcgcttgaacccggtaggcggagcttgcagtgagccgagatcgcgccattccactccagctcggacgataaataaaaataaaaaataaaaataaaaaaataaaaaaataaagaaaagaaaaatattccttctttgtgtaggaatatccgcaagagggtaacatgaactgagtttgaaaagatattcatgagttttctgaacaggtaaggaaggggtgttgcagagcatagggaaagcaatctagaaggaagaagcagcctcagcaagaaagagaggtgtgaaaaggcacagagaactcagaccacggccagaatttaagtgtgattatttcatggggtttacaaaaggggacaaaagttagactttctgcaagaaagaccgactgggccaacattctgaagagtcaaactaagaaatttagactttatcttgaaggcaaagagaaattaccttaagatttagaagatggtggtgaaactggtagcctggggtgaaaaaaaaaaaggaacaacaggaatgaggagaggttggagctagagatcacttagaggctattgcgatagtttagtgaatagaggataagtgctggaactagggaagtggcaaggaaaaaacacaagagttatttctgaggacgattcaaaagatcttggtggtctttgagatccaaagttaggggagaggaagagtctaagaatgccacagaccagagacaactggatggatgtgatgccccacgttgagacggagcaagaattataaatgctcatttagatgacaaagcaaattttatagagttctcaatctccaaagtggtatggtgaggtttggggcaatggtggtatgtgtgaatatagggtccaaccaatttagctgataagttttaaacaataaggtaaagtggcttattcttcgggaaaaatcagttttcttatttttaaacgtagataaaatgttcctcaggataaaaatagccacatcttttgaaatataatacagtgctatttggtgtaatcccttagcaacgttgctgttatgagccagtactagcagcattcaagttatagactcacatattgcatatttttaaacctgtagatggataataagctgtgagagggacataagtttgtccatgatagacttcagacatttaaataattagcaaaatcataaacagaactaagtctttttagattattattctatttgatctttaagaactcttcccaagacatgcctccaaacccacattaaagtttagagatagaaatcagtgagcaagccatcagtgtgtgtgtgtgtgtgtttgtgtgtgtgtgtgtgtgtaaatgtatccaaattgaaagtgaaagaatgtttgttttctgaagtcatctctcttgtgccaatatttgaatattccacttattcacaaatgttttttaaatgtaatttccaaacttttggttcaaggctataacctggaagttggggctactgatggttaaaagatggccacaatgtgtaaaatgtaaagtaattgtcagcagatatggaggatatagtttgtagttatagtttgggcagtaaactagttgtgttaagtaatttaacccctcatgacacatgtttcttcaaatgtaaaagatggacagtggtggactaggttagtttaagcctcagtcccttctcttctcgacattccataatcttagagaaatatgtcttgttgatgtggtcaattacctattttcatgctactgctccacatgtgggcaactgaacccagatgatccaattagaataagacaaggacttaggaacattccctgcttggggatttgttcctatcctttcccttctacctcctctgcccaccacctcccatttccatgaaacacagaaggtacatcattttagaatcaaaatgtaaaaaggtgatggattcattatgtttttctgattaatcaaaggcttagaacacactagctgataaagtattaaatgaagttaccaagacaatattctattggaggcaaatcaagaataaaaggttcaaactaattttgaaaaaattaaaaagtctaatactgtgttactgtgttgacaatatgtaggaaatgtaaaaaatatacattttccttgcattttttgctatttaaatatccttagtgtccttacatattaaaatttaaagatgtcaaccttatgtcagttttccaatatgcttttttttaaagatactgtttcctaaattcaaattcactgatgtagacaatctgaacggccaatttttcaattaattattttggtaatgtgaaatctaaattttacatcatgaacctagattaccgttacatcctttaatgaagaaaaaattacactaataacctgaaaaatcaataaaacaataaagaaatagcttttataacctagcatagaaaaatgaaaacctaatttcttttattatttaaatattacaatatgttttctttatttaatatatgatgttaacatatttaaaaaactaatgttgccaggcacggtggcttacgtctgtatcccagcactttgggaggccgaggcgggtggataacttgaggccaggagtttgagaccagcttggccaacatggtgaagctccatctctactaaaaatacaaaaaattagtcaggcgtggcggctcgtgcccgtagtcccagctacttgggaggccaaggcaggagaatcccttgaacctgggaggtggagtttgcagtgagccaagattgtgccactgcacactccagcctgggtgacagagcgagactctgtctaaaaaaaaaaaaaaaaaaaaagctaatgtcaagtaaatataatatgcgcagaatttatattttgtgtgattataggttttagctcttttccttctacctaaattgagtcaggcatggtggttcatgacagtaatcccagcactttgggagtctgaggcaggaggatcacttgagcacatgtgttcaaggctacagtgagctatgattgtgccactgtactccaacctgggtgacagagcgagacccagtctctaaaaaaacaataaatataaatagataaaaataaatgaatcaaacaaagtatctaaatcaaatgtccccttctggatatttgtatcactataatccagaatattttataatatcaaggaatcatccatgctgcttgtattttcaaccttagtgtattatattattgaaaataatattttgttgtgtaaagtcaaagaaacaataaaattatttatcagttcagttaaatagttgtcacattttgaagactattggttgaaatgattaatctgatatgtacatttttaaagagtgttttaaacatttttcatatttcattttgttctcttggtaacttagagactcatttctctggtaattttattgtttgaaatttcttgcatgttgagattaagacatgaatctaccttgtttgacagacacactttatataaaaaatttatttaacatatccaaatttcccatggacttaaaagaattgaccacaaaatatctaagggttgtctccttactgcttatatacattttttcattaaacaagattcctctttcccattgcttcacaaactgttacaaattctcaaaatttcagccaagataatatctggaaatgctacagtgcatgctagaaatagctttataaaagatatacctttcttgataatccatagggaatcattcatccatccacccatgaggctttttcagagacattaacttgatagactatttaaaccccccatttggatgatggtaagatggtggtgcgcacgtacacacacacacacacacacacacacacacacacacacacaccttttcttgtttgcttttagaaaattattgaaaaagacgttagatgttctcactagctttaatttatctgaacactctttcataagtatttatatgcattttacaaagtcaacaaatacactgatttgcctctgttgtgatcattaacaccagtttatactgcccagagtttctaaagttaaaatctctaattacttctagaagcttgtgatatatgtcattttgttaaaaatggatttaaaccatatctcatttttagttcattcaggctttatgtcctgtagtatcagtcgatataaacttcacgttggtttcatgtatttcttgatgctgtcaacaggcccaggttctgcacacatttatttaaggtgggctcaccacctttgatgaggcaggagacttgggtttcagtcttagctctagcactcacagtctatgtgatactgaacaaattgctcgcatcttctggggctcagcattcttgtctatcaaatagagataataccatctcatctcagtgttgttgtaggattcaaataagttaataaatgtaaaatttctttgataatttaaaagcattgttgctgttctctttaaaataaaaaagtattgttgctgttctctttaaagaatgaaactaatatccatgtcctccttaaagatgtatttatttgcaaaagcaactctattaaggaaaaacatgacatgcaatgtgtgagcatgtggggaatatgcaagtattgtaaagaattttaagtctaaggatccttaaatagaatgacaatgatatatcaggtgagccacagtggcagctacatataaatattatacatcttagtttgcctgtgaaccattcaactaaaaatttcaaatagaacaattaatcaatgtagaaagcatagcaaaaaataaattcaaatcaatgatgcaatacctctattccaattagcttatttttctttcttccactctctcaggcatattctattttattaaaaaatgaagtcaattaagaaactctacaaaatcaatcagcccacagatcaagctagaactcttgttcttatttaatgtttattaagggctcatcatcacacggtatttttctattaataggtcaaatatacaaagtatcaggcttgccttcattctatcattggggtcctacatagtgtcgtgctcaaccaaaggggagagagaaggacatccacctcttcaaacaaagggtcttagcagtcttggctgaaaaatgaaacttttatattaatttatggaagtctgcagtctttgatctgaattgaggttattaattacaattcttattcttcccatccaacaggtacaagaacatctccaacaaggtacctaagggtgtgagccaggcaaagggctaagagcatatatgcaagctgaaatgatgtgtacacatcagggttatgatagtttggctggattcccttgtacatagtgtatacaacagagagacatgctcacacacacacacacacacaaaactcaaacacacatttgaacaccattatgattttctgatcagtccaacctactgtcaatcagagttggacaaacaatcccagccctagattttcctgtttccacacccagacctgatttacaatttataactgcccattgttcagacttgtggcttggaggtgcagtacatcgatgcctgtccacatctaaggttagatgacgacccctctactttactattagatgtgccaaggatcagcagctcctgaaatctttttcctgtgcctgtgtgggggaggggattcacggcgtggaaggcctgggacagggaagaaaggagctgtccctgggttatcaggaaagggaccaaacgtgggccccacatccacctccacgcctgagttaagaatctggagctgactcctcagaatggctgtaattggtcctttactcatttccttggagaagcagcggtcaacttctactaaaactcccggttgataggcggcttccctgccctgtcttccggagcacttacgttaaggggaaatcactataatcaaatctctacgtcttgcctgctgctaaaacaaggcgctttcttcctgggattttgcagggacgactgatacacacacggtctccctacacacaagctcgcacacaccgacacagtgtaactcccacagcgtcctcgctccttctccctccctcacccccttgtctctctcaaggattgctgaacattttgctccaaactctccaagtcacccacgtgttctccccttttgctattcaatttacttctccacctgacgaagagaaatgcgagttgttcttaggcttttagctgcaatcctgggaccaggctttctcactcccccctcctccccagtcagagcagccccaccgaccctcttcccaatagggtgagtggacagatgctgggtgctttcgctggtcaaatcccgcaaaaccttcaccttctcttcttctccacccagagcaaactgattttgcctgtttagtctcactagccagggtggtatggaagtgggtggggagagggctggtgcgtggcacagataactgggaagcgcgcgcaccacacacacacacacacacacacacacacacacacacacacacggccccagttaacatttatgcagtacttttggggggtctcttacacacacctgaatagcatactctcaataaaggataggcacacccctgtttgtcctcccccaatttccagactagcattttaccctgggtctagaattggtggtgataagccgacttagatggagtatttgagaaaaggggaggtgaccctttgcctgaatgggggagggggcgctctccactcaccgcctgagtccctggaacgaggagggccaggacatcctggatttcttcaggccgggccggtggccggtctccaccgcgtaggaggtgcggtccatggcgcgacagtacaggtagcgctcggtgtccgagtagccgcgatgccggacgcggccggtggccccgctcgaggcgtagcggccgcgggcagccccgggcggcggcgggggcggcggcagggggggcggcggcggcggctgtagcggacactggggctggggctggggcgagggtggcggcggcgggggcaggtggtgatggggatgcaggaggcggaactggggctgccggagcgggtactggtggtgctgctcgtgcctccagagatgcttgggggctttgagcgtggccccgccggcgctgtcgctgccctctccgctgcccgcccgggccggcgcgctgctgccctctgcctccatcctggctcgcggctccgcgacctgctgcccagcccgggttcaccgcgctggcccgagcgccttcctgatgctgctgctgctgctgccgccgccgccgcttctgcagcccagcagaggctggtgcttagcttctcacttgaaggcgccagagcctcagggctaccgagagggggccctgccagcgggaggggtcacagaacgcggcagggctccttccaccgaggctatggcagagacacgctcccgggctccccaagtcaccaagactagggtgcgcggtgcccggtttcgccagaggttggtccttcttcctccctttcttcttcccttcctttgggcgccggcggcgagagcagggattgtcagcaactcgggctgcagaagcagcagcaacggcggcggcggcagtggtagccgcctccagggcaccggaaccctgatcccggagctgctgaaaagttggacagctccaggctggcacgcccgagctgtgactttcaccaaaaccactccagccagtcaggagtcagacctgtcctcttgatccttcccctcgccgtgcccgcgcctccctcctccacactgctccccactgccccggagccttcctcttcacctccgcttgcctcagtgctcttagagaaatggagtttggcgattcctggctggttctcagagcttgttgacgatgagccccatgctggtgcttccaaagataaggaatgtgaccaggcaaagttgcctggaatattgtctatgcgcgtcgctgaaaaattggatctgggtgaagatccaatagtaagattaattcagtctctttccctgacataggataaaacattgtgtggctctttcccacagcagggagaatgcccaatgtttcctcttgaagatcttcctccaacttggcctcgggagtggtcctcgctggaaatcaaggcgagtcgtccttagttgcagagccatggctgagcccgctggccagagttaaggttaaggcaccttttcaattacaaacctctgattatcttcggtagtctctatcttcagtgcctgcctgcaatttgcctttctgccacttccagcagaacacagctctattactaaagtgttttaaaaacatgttgtatcaatattcacagaaattagagtcctatgaggcactagaatccaaattcaacttttgtcttcctttaattagcattttcctgcagtgtcaaatgttttttaaagaagccaagaggatttcagggcaatatatagacacttttttccctgtaccttttttatttgaccatattacttaaagatgaaatgcaatttgcttactgttaaaataattctagaatttttctttgtggaagttaccacgtaccatccattatttgaacgataatatatttaggactcacaacaacttgttggctgtgtaattattctattcttcccacacactcagtcttaacatattttcatatgtacatttcaagcatatcatgtaatggatgctagagtaccagaatcaggaaccatgtctcaaactctctagactgctgaaaattcaacactctccacacagtctagatgccactgggaaaataatgccaatgaaaataagtgctcactttgtttatcagcaagaacagtccacgaaatgtgcaagtggcaggagaaggccttcatcatctcttcatgctatttatttatttatggttggaaatatacctttcctccatcagtttaatatgagccctctgctcatatgtggactatacacaaaatctgagaaaggttgtgtcttaagagaaacaaggcaatctcctaagcaccactctccactgtgtaggattaaaccatactttacaaaggcactctttttgccccttttgcagacacaagtgtgactggtggcagtggtcaaagtatttaccatgcctaggagggcactaagccagtattttcccaaacacaaaaggagagaaatggaagtgttctgcagtatagactgcctttttcttttaattcattgcattattaacatccaaaaccattttaaagaagtacacaaatttcttctttcccctgaaatgcttgccacctttcgcctcaatataactgtggcaaaatacctctatccgaaactcttattctaatttctcatacactaacagtacaagtgacttataatttttttccagattaaattggaataattcaaatccaacctgattttcaccaccaatttgctccttcctttttactcatgaaaactttatcttttatatatttcccactgatttttaaaaattctttgttttgtttttactatgtaattgcaagtcaggaacattttaaaatgtaagaaaatcatttaatatgtttccaacttgtagagtttttaatttaacttataattccaaaatgttattgatagtaatagtttcttgtgtgatctttgaggttacagcttgagttccaatctaccacttcctacccatgttactttagctaaattatttaccatccctgtctcccatatgcaaagtagtactaatattacctacttcacagaattttgcaattatttaatgaaataatacttagcacaatgccttatatgcaatgaatgtttaataaaggtagcaatttttattattcctgccaggctgggaagtatcctaaatatcatgttaatcagcagttcccagtcttggctgtacctagggaatatcacctgggggagcttgaaaaaaaatgtctgatgttgaacctagagcagtgattccaaactttgatgttatcagaatcaccaggagagctaatccagcacacaaagacccaggctccatgaagcaggatagggcttgaggctttatacttttaccaaatttgtgagaagatgctgcttcagtgtaaagtttgatcatcactaccctgcctagacaaataaaatcagtatttctaggggaggatcaaggcatcggcattttaaaaaactcttcatgtgatttcatacatcagcaactactgatccagacttactctctcattaaatggttgcaaaaacactgtagatactattagttgactcgcccttgtgtctcaaatacttctagggaagtccagcttataagcaaagttctcatgaaaatatgcactttatgtattactctagttgcctctatgctaaaagaaaatcttatactgctgaatattgagcactcccagccttccatttaaaaactcttctcattaatctaggtatttcctacttttaattaaaacaacaaaaatgtaaaatattccatctacccattggttttccctgcttatatgttaaataaattatccattctttttcccactagttgaccatagattttggagttttatgggcacagtctgagagagatttttgtgaagcattgggttaatgtgggacatcctggaaagctatcactacttaccattagcacatctatataaaaagtaaaaatcaggtaaatgatcagtatctttttcctgaacaaacttaaataagcagttagttggtgtcattaccatgcattatgtcattaccacccccacccttttctgcaaatgcatttcaaatctgtccaaaagatacaatcaatcactcaatgtgctgctgggcaattaacaagggagaacattcttgtcaataatgatggagagttctggcagaagtgatgtcaattaacagctagcagagagcaagcaccatttctatccagaacacagagtgagatggcaagtggcagtaactaagggtccatttctatcttggcaatgggaggaggatttttttttttactttttttattatactttaagttatggggtccatgtgctcaatgtgcaggtttgttacataggtatacatgtaccatgttggtttgctgcacccattaacttgtcatttacattaggtatttctcctaatgctatccctcctccagcatcccaccccccgacaggccccagtgtgtaatgttcccctccctgtgtccacgtgttctcgttgctcaagtcaatgggaggaagatttaaaggagactttcactttgcatacattctatgtatacttgagcacatgagtgctacttcatttgtaaagatggtcatcttgatgcccaacagtcagcttaaaatcggaaattttcatcatcatatgtgttacaaaaggctaaactcctgtctaattacatatccaaaggcattgaaagtctcagatttcacttaggtctttaatgttgagtagaaacaggttcttaggatatttccttgagatatatgaaaggcttttaaatttgtaaaaacctatacatatacaagataatattgtcagtattgccagtacaagtactagtattaaagtctctatcatattgtttccaacgcagtatattaggctgcttttcagtaatttttgtctaatatgaaataaacagaaatatgcaattaatatgaaactaagaaatgctgtacttgaatatccttgtctttgactagcacactaatgcaaatttagcagcacactaatttccaactagttggaggctcagtatcacaaaatcaattttgtaactttctaatgataccattccacttgtcagctcaaggtaaaaatattgcttatctactgtgtgctaattctcaggacgactgtgatactgcattgacaaacatgcacaaaaaattactatcctcaaggagttttgtgtcttgcagaggaaataaataaataagcaactataatttgggaagatggggggaagagatatactgatgcggatatgtagtgtctgctggaagaacattcaacccttacagctcagtgagtcctcaccaaagggagagtggcatctaatctgaggccaagacctcaagtacacattgaaattagctattttcagtatgtgtgaatacatatgtgtgaccatgaatgtgtgtacgtcttggggagatgaaggagtaaaggcattttgggcagagactggcgcagacaataacttagagatgagagatattgtggggcattggacattcagaaaatggcaaataagtctataaacctgcaaggacagctgagcaataagcagaagcctgataaagaattacttcttattcagtgtcccctaaaggcaatgtagtgactttgtatacattatcaaaaggacccccttctgagtggagcaggttttaaagttgatgagtaggatgcaaagagagggagaaataacagatatgacagaaggaaggaaaataacaatatgttgtccctgagaagatggggttgaggggcgttgaactgcagggcacagatggaagcatttgcccaaactagaaaaaagccaacatttccactgttacaggaaaggaaggggtaaggattgattcagatggaattaattttattgcatttattgaacaattaacatttgatattctgattctggcaaacattttccatacattattttatttaattcttgcaacagtatgcttttttcatcacattttaacattataatgatcaggatgagtctttcagtggggactaaagaactgtgctagtcctctgccaatgttgagaatagcccgttggactcttaactctacatagaaaacacctgttcacctgattgtctcaacattaattcagccatttaaccaatatttattgagcacttaatatgtgccaaccctaagttctggagataaaaaagtcaataaagaaaagttctggccctcctcttctaattaaaaaagacagaataaacacctaagcacatatatatatatgtatttatatatacatatgcatgcttaagtggtaaatatatatatatatgcttaagtggtaaatatatatatatagatgcttaagtgtttattccatttcttttaattagagaaatataaataataatatcagatacaggagctcagtgttatgaagcaaactgaagcaaattaagaagttggagtgtgatgtttgggagtgctattttgcattggctggcaagttaggcttatccaaaagagtaatggtagagtggcctgaaggaagcaagggagtaagccagcactccaggctgtgggaaaatcaagtgcaaagacatggcagccagcttgttatggctgaggaatagtaaatcaaccagtggcctgggatgaagtcaggtgaaagctgtttggaaatgacagatcaaggaagtccatgctggtcatggtaaggactttggatttctgacttgcattcatatagctacagattgatgaactttgcacttaactaaattaagactatttggctgggtgcagtggctcatgcctgtaatcccagcactttgtaggccaaggtgggcggatcacttgatgtcaggagttcaagaccagcctggccaacatggtgaaaccctgtctctactaaaaatacaaaaactagccaggtgtggtaatgcacaactgtaaccccagcctctctggagcctgaggcaggaaaattgcttgaacccgggaggtgaatgttgcagtgagccatgatcacaccactgcactctaacccaggcaatagagcaagactccatatcaaaaaaaaatatatatatatatatacacacacacacacacacacacacatatatatatacactatttacttaaaatgtcttcaaaagttcatactataattattaatacctcattgaagagctaagttattttgtatataggaagaaaattaaaacatgggtaggagacaaagatttactataagtgaaaaaatatttcttcctgggagaaaaactgcacttccatatcttattgaaaagcaacaagatattcataagaatgatattggaagctgcatattgctttagcattgaaatgtctataaaatcatggccagtcacacagcagcaatacagttaaaatgagtagatattaccaaatccctcagaagatgtcatagaactttcaaagtgacagatttgtgagacctgaagaatgattactcagttgctaaatgtccatctgtcacaagctcttagctaactttttagagatgtttaactttttgtggttgataattatattttttataaaaatgaatcaatatgccttgaaatgtcactcttgatctcaaaaatgtaaaagagatcatgaaagagcttgtcactttgaaattaggcccaactaccaaaggctaaaactgtataaagatctttagattcttaatgtagaaaagatttaatcttatagtttgagatgatgaaaagtaatgtggtaggtaggcattggtaaggcaaaatgtatgcatttttaaatcacttaagaaaatgtaaatttaaactaatagttctcattttaaaaagctcccattaaattgactcaactattgtaattaacggatttcttaaaatagaagaattgtagcagcaactattttacatatgaggaaactgaagcttatggggacaattacttaactaaggtcagatacttgctgtttcaaagcctggatttgagcctcgtcaagctaagtccaaaacttgtgatcttgcctggatgacaaatgggagaaattaaacataggccttttgaaagtaaaatgccaattgatgagttatttaagaataccagttgaagactggtttaatatttcagttaatatcatcctagagctctaattatgtattaaaccacccatccactgaaattattagaatagtattatagtattcatgcaaggaaggatttttttaaaagatacaaaagcagttacagcgaaagactgataaactatactaacatttggaacttctattcaagagtgatcaagaaagtgagaggataagtcataaattggaagaaaacatagcaacccatgtaactctcaaaggactatttcaaaataagtactcctatgaatcaatgagagaaaaatggaaaaatagtcaaaatacatgaaaaggcacgtcacagaaaaggaaaacagaatggtaattaaatagatgaaaaaattgaccaatctcattagttatcagggagatgcaaataaagaccacagtgagaggacattttatgtccactaggtcagcaaaaagtaaaaagcctgatgacaccatgtatttgaaaagatgtagatcaatgaaaactcatatactgctggtggtaaaacaatttaccattatctggtaaaggtaaacattcacatacactacaattcataattctactcctgggtacacagcacagaaaatgtcttacatgcaaacacacacacacacacacacacacacacacacacacacacacacacacacacacggagacatgcaccagactgttcatagcaggattatacactataacacaagctagaaacaaactaagtgtttagcaggaaggactattagcacaaatgttacatcaggaagccatgaacaactacagaaagcaacctggatgaatcttaaaatgccctgttgagcaaacaaagcaagtagcagaagacaacaaacagaatgtcattcttataacactcaaaaacaagaaacaaataagaaaacaagcaaacaaaacaacccctaggaagacaaaataatatattttggtgtagtgcttcttaaactaatgtgcctgtaaatcaacagcaattcttgttaaaatacttattttggttcagtaggtctggggcaatgctgaaattcagtatttctaataagctcccaggcaatgttcatgcatagatctgtggaccatacttacatagcaagattttagaggatacatacatatatgattttttaaaagtattaaaaatggaaaggttatgcaattcatgaaatttcagatggttgttacccagtgagtggtgaaggaaaatatggtaactgagagaaggaaggagcccacaggtagatacaacatattgataatattgcagttcatatattatatgctctataacctacatatgttataatgctgaatattgtataagaaaaaccataagggcaattgtaaccccacagggtagggaactcacatcatcaccagcagaagagatggaaactaagtgggataggaagaggcagtaagccatgtggagttgaatatctcatttcagaagagagagctgcaggccagtcgtcaacactgtatttgtaatctccccagattaaataactgggcagacttttaaaactgttgtagcacaaaatttggggaacctaaatagaactctgagctaaaaataactacaaacatctttaaaacaaaattcatcctcctctcaaagtttagttttaaagttttatagttaaataaagttaataccaaattaagataaaaatttttgtgaagtggtgtgtgtagctctcaaatccaaggtaaacctgttccattctttggctgcgagttgcccaatcctggcacacatatattcctaaatatctatcccccacatcctttggatatgcagaaacttttcttggagtgagaatgcaattttatttctcaaatatctgactttaaaatataatattccttatcatctaacattgtagctatcaacgaacatcacagcaggaattagtaataactaacaagaactcaggacagttgcctaaggattaggaagcggggtttgcaggcaagagaggagaattactagtttaaaatagaagatggggagtgacagagaaaaattctctatcttctcaatattatctcaggttcttcaaactgttctgatgtataaaatattgcaataaatctctggatgaggcactcgtctaatgtttagctgctctaaagggtgaaagggataagacagagcaggcaggatacctattagcttgttgtaaaggtaattgcgatttttgtgattgaaagtaatagaaaaaaaactgcaattacttttgcaccaacctaataaattgacaactactacttattgggtttactatgaaccaggcattattttagctggttttcaaaaattagtttattactatcccgattgtacagataaagaaactgaagcacacagaagatggtaactcatccaaggacacacagacagcaagggcaaagccaggattacaatgaagactgccagtttcaaagctcatacttcaggccagtgttccctgcctgcctctctgcagtgtcccaatacctagttctctgcaagcgtgtcttatgtctgtggacattgtcaatttcctcatgattgttctatttaagaagatgggtataagcaccagacagagcaaatcagaatcctcaaaaattgcatgactttttggccaagttttacagctttgctgagccttagtttcctcatctgtaaaataaactagtgacaaaatatacatgataggactttgcagaaattacataaagtaatccatttcatgcactcaagaatttgctgctgctgttattggtattagtattactaaatcctattataaatctaaacccaagtctgtctttacttaagattttgtgcaaaatactatgctttaccatgtgcattttacatatgtatagatatgtatgtatatatgtaaataaaataaacaaggcattttctttttgtttctttctttctccccgactcctctgaatcaggctattatggaaacacattgaaaggaactccaggactccaaactagaaccaggaccccaaactagaaaccttaaataaacagaagaaggggagtttctctcccactttgctggaataaagccattttaggattagccatccaagtttaaattcattagcctccaaggggtttgtgaatatttttagataattatccaagacctccaaaatgcaatttctaatgtagctatagctgtcatgaattgaaagatgaaaaagtctagctcattagatcaaatggtgtttcctcaagtgataacaaatgtgatacttttcagcgtaccacaattctcccttaagatctgaagtaaataagacttcaaagaggctcccagcattaagggaagactagtttcttaatctgtcctcaaggaatacatgttctctccaaaagagagaggataggtacctggggaacactcataaactaactcagattggagcccaattattcacttttttgtgaatgcaaaatttttaatgaataatacatttttttaaatattgggaaaagatgctgtttatttttattaaattgttaaatttccaagtaacttggtaagtaaaagaaaagaaaataagaacttcaggaaaggaaaaaatatacagaattcacaagtcacggcagactctccaacaccttagtttttaatgtgtttgcttgcttgctctgtcttcttacagagttggcacagtgatacaagattttatttattttaatcaaagtagttttgacatagtatttggaggaaggagaagaaggatatgaaccattattttcctcagcatgacactatcatttaaaataaatggaagatccatggtctaatattaccaaggctgagtagttttccccctggctcagtgcatggaaaacagcatattttcttcatgcataaataatagaaatctcatttttgaacacagtgaattgttcagaatgctttgtggagcgtggcaaatgtagatctagatttatgtgcaagtggtccctgtgcagattcaaagatgtggactaattggccaattataaaccacagattggactaattgacccagttcttctttgatgttggtcaagtaacttagaaatgatgaatctaaaccaaatcagtagtctcatcacagttaaatattattcattcttaaaagtatgtcatttatcatggttattaagagaatgggcattacagccagaacgccctgagtttccgtttcagctccaagactttctagatgtgtaaccacagatgggttacattaacctctctgtcagttttttcatcgatgaaaataacagaatcaactttgcaatgttactgtaaagattatatgagataatagatgtaaaatgctcagcacaatatctgttacataaataatgcatgtatacctaagtatacacgcatatatacattattatattccatatatgatgttatacatataatttaggaaattaggggagtaaaaaaccaagaactcccacagtaccatgacaggggtagtgcttttgaaaattatgaactgtgttgaactagtaatagggctttgcctttaagccggcaatgaatattttagtgagataaagagcttctgtattttaaaactgaaactagttctgccttcttctctcctttgtttctacttttatttctattccatatgtgtttcctggcaatggagaagggagaaaacagatgtttactggagggcctactatgtcagatgctgctgcagtgggcacttcacttatgcgatggcatttgatagccatggcctttttatgaagaaggtattgttattcctaatttacagatgaggaaaatgtgtcctcatctcataattagaaaacactggaactcaatttttagccactatttaggtacctccaaagcgttttacatttctttagttaaagaatttgccagatacagtgtgggtcaggttcctatctatttttaatcgagaacctatttctctaggaaactatgctagagaaagtagttagcttcctaagccagaaaaagtagttagccttctaagctagccttttcattcacaatagaaatagcacatactgcaatgaaacagggtcaggcaaactgtggctattagacaaattcagctcgctatctgtttttgtaaataaagttttattggaacatagccaaacccatgtaattacatgagtaaatgtcaatgattgctctcatacttcagtggcagagttgagtatgacagagactgtatatctcacaaagtctaaaatatttactaaacgaatctttataaaaacagtttgctgaccactaatgaataagaaaatattagaataaaaaagctcaatatcactgatcattagagaaatgcaaatcaaaatcacaatgagataccatcttattccagtcagaatggaggagaaaagggaccatttatacactgttgatgggagtgtaaattagttcaaccattgtaggaagcagtgtgatggtttctcaaagagctaaaaacagaactaccattcaacctagcaaacccacaactgggtatatacccaaaggaatataaattgttctaccataaaaacacatgcacgtgaatgttccttgcagcactgttcacaatagcaaagagatggaattaacctaaatgcctgtcaatgacagatttggtaaagaaaatgtggtacatatactccacagaatactacacagccataaaaagaatgagataatgtcactggcgggaacacggatggagttggaggacattatccttagcaaactaacgcaggaacagaaaaccgaatactggtcccttttctcctaaatcttgccagcagctgttatttttttgactttttaatcacagccattctgactggagtaagatggtatctcattgtggttttgatttgcatttctctaatgatcagtgacattgagcttttttattctaatattttcttattcattagtggtcggcaaactgtttttataaagatccatttagtaaatgttctcatttataagtgggagctaaattaagagaactcgtggacacaaagaaagaaacaatagacactagggtctatctacttgatggtggaagatgggaggagggggaggaaaagaaaaaataattatcgggtactaggcgtagtacctgggtgatgaaataaaataacctgttacaacaaacctccatcacactagcttacctatataacaaacctgcacatgtacccctgaacctaaaataaaagttaaaaaagagaaaatactatgtggcaagttctatcacgaacaaatcatcatttataaataacattctctctgcgtttaaatactccttgtcatctttgagcgaaaaatgagtattaatgtagcaaaagatgatttcagcagcctccatcagccctagagtggaccaaggagatgagagctggtctgaattcaaggacctagttctgactgaggaagtttactccaaagcaagagctattctctttacagctcccaaacatgcccaccacaaattgctgtttgttctcagccttcttttgcttgtcctcttagctgaaacttcccccaagtcctcattcttttgtcactatttgacctccctcttccctttcagaaggtgaaagcattccctctcaaaccaaacatccctttaaaacataaaggaatattacagttatttgcactgaactgaacctgacctatacataacgttttaactcttcaatttgcctgaatttctttgcctattttcttctgttgatgaaattaaagacttggtaatttcagcaattttaggcaatattcatgtttaaaaagaaacatttccagttcctaatttgaggcattatgcctcaaatgaactatgaaggcaatctacacaagtactcagatgtcattaatgaaaaaggcaaacaatttgttcacatgtctaaatgaagatattaaataaactcaaacttttttttaaaaaacaagatggaattacttttggaaaagttgcttgcttttgattattggttacggcttccgaaaacaagtggaagcagcatccactgtacccaaatttgcatcaacctgagactgaaataattcctctgacaattattataatttctactgaaaacttttccttataccttttgtctcccattcttgatgacttagtgatgcaagctagaacctagccataataacctcctcaagatgttcgcatatgtttgttctggaagctattcaaaataaggtccatgattgtatattttattcactatggactataattcccatagctatagtgccttaactaagaattggggttcatagtctgatggaactatgaaaatactctaatatattccctagagttggtctctcagctaaatgtggaagatttagataattgagaattctacatctactttcaaaaggtaatgattaaagaaatccagaaatcttgactaagaattaattaaatccatgatggggaaaactaattattagaatacacttggaaataacacaaagtggtagcttaattttttatgaatttctttcctatttacagatattcccatacccatcatttgatcttatattttcaacttggtttacatttgtacattatttttatttgcactggctttttaaagtaagttaagtgacttgcaaatccagttacattaacaaaaatatcaaatatgataaatacattaatatcatttaaaactatttcttccctttgatttcttatacccaaacatttctaggtcttatcaattcttccttcactatatctctaccaaccatcactttcttttcatccctgcttccaaaattataatacaaaccttcaccatttcactcctagattattgtgacagccttctaatttagtattattcaaaatgtggcctgaagaccacttatttagaatctaacccttaacagggagattatgcgtcctctccagacttgctgaaccagaatctctggagtaaggttcaggaatcggcaattttaacaagctccttaggtggattttttttttcttttgagacaaaggggtcttgctctgttacccaggctggagtgccctggcgcaatcatggctcactgcagcttcaatgttgtggcctcaatcgatcctcccacttcagcatcccgagcagcgggattacaggcacacaccaccacttttgtatttttttgtagacatggagttttaccatgttgctcagccttgtctcaaacacctggactcaagcaatccacccacctcggcctcccaaagtgctgggattacgggtgtgacccactgcacctggcccttaggtggcacattaaagtcaagaaccactgttctgctttcttcctttctcgttctccctattttcaagaaattgtgcatatttctatctggttagtcattccaacatgctatccttgtcccctgtagaaaaccttcaatggttccccattattctcaggataaaatcccaatgtctaaacttgaaaataaaggacccacataaaatggtcagaaactacttctgaaatttcctaaagatgacaaacgaattcctagtttcatgcattttgaatgccccatatataccccccaccatcgtacttctctgcaacgtggaaaaacctctacttattcacttccaactcgttcaactccaaacacaaggcaatgtcaaatttttccatgctgccttcctcgatctttcctttttgggagctcatctactttattgttgctattattcatatggcagtttatcctagactgcctgtgccgcctcttgaattgtcatttaatttttaatgtgagtatgcctgtctcatttttgcacctgattgtgaagttcctgagtgtaagaacattttttgtattcaactattctcctagcatacctatagacaatgaataaataattttgaaatgattaaatcaatacaagattgacaaagtctctactgatttaacccattatttagttgatatggttcattgtttctgaattgcacatcgtctactttaacaaaaacagattttcttattttatgagcttacacctctctcatgttcacataccaaagagctataactacatccatgactacaaaattgatcccaaaccagacaaaatgcaagaaacagaagcatcagctactctggtctaaatgttgtatgaaaatcttgttggctgattcaagtgggagaaaagcttgaagttataagcatcattttgactgttttatacccagttgcacaatcaaaaagtgcctcatttatcagtccctgctctcaacacaacaaacagatgcttgtaatttgaattgtatgactctggtatcaccaccagacactagatccttgaaagcactttaacccttgatagttaaaataggatatttatctccctgcccccaaagaactccatgtcttaaatgtaaagtcagaatttacaatgcagtagaatccttggggtagggttaggatccacaaaacagactcccaggaactagacagtgaactaactgaaggattatcataggagtaaaactgtctttgtaaaagttataacagtgaaaaaattatgacagagaaagagatatgacctaacagattccatcttgcttttaacctccaagctgtccttattcattcctgggcataggccaaactaactttgggaagaatttagtttatagtttaactttgaaacaaagatgataatagccctttcccaaaacaaactcttttcttgcctggggaccagactggctgttgtaggactaacaaatttgccacaagattagaaattgcgatttaggaatcatgcatctagaggtcacaagattctaaaaatccccagttgctcctagggataacatcactattgtaaaacctaagattggtgcttgagatattttttggaccctgaactcgaaggatcagctggcaccacccagattgataaactggctcatctggtcttgtgtccctcacccaggaaccaactcagctcaagtggacagcttcaactccctatgatttcatctcccaccgaaccaatcagcactccctggcatcctatctaccaaattatccttaaaaaaccccagtctctgaattttcagagagactgatttgagtaataataagactctggtctcctgttcagcaggctctgcgtgaattaaactttttctattgcaattcgtttgttttgataaattggctctgtctgggcaggaggcaaaatgaacccactgggcagttacaggagcatcggttgacttaaagattggcttatccacctaccagaatctaatgtctgccatattaaacactttaaagcaattagagctgtcttactgagaacactttggacaataactgataaactatgtaactgaatgatcttttgatgaggtctaatttatactataattcattttttagatgtttaaagtaatgtattatggtaatgtataatgcacttagtttctatgaccaaaacataggaataatttctctgtttaaatggataatttattttttgtataaattataatgattttaaagccctataagactcacagttttgttattattatttaaattttcatagaatattctttttccaaacaataaagtacaaagggaggaggctttaaactaatagaaatttatgttcaaatcccaactctgcagctggcagtgtgagtctgaatgataattcctacatcaaaggactgtggtaaggatataataacacgtgaatgttgccgtctagttatttgtttgttatctgctccttccattagaaaccaatcccaatgacagaagagcctgatatatagtaggtgctcagaaatcatttgttgaatgaatatgatcagcttatttttctgataagaaaagatttaagctaatttttctatattttaatgtaactcaccttaaatacttgaggaaaatatttcccgggaaggaaaatgtcaagaggaagcagaaagcattcttgtctttcttctttcagatgcaggaaagtaagactgcacttggtgatgagatatgcatattatcaacaaattaattgtattgacaggtttatcaaagagtagtctggcaatgtcaaaaacaactgggcatataactctgaagacttacgacaattagatcagttaattttgtgtttttttaaatggcccatgatgtggctggtggaaagtctgtatttgttgggttgtacattcttaggccccctcatggtttttagtcactaatacaaatatgaaaagtaacaaggattacatcatgcatttattaaatacataattattgagcaccaactaattgccaggaaatgttccactcattggggatactgtggtgaacaaaacaatcaaggctgctaccctctgtatttaatgtaccatgatgaacaataacacataataaatctaaaaacaaacacttcagaaaggaaatagtgaggcatgttattctgaaaaataaaataagagatatgctagtaggtgactgaaggctgctttagattgggtgccagagaagacctccctgacaagtgttcttcaagctgagaactgaatgacatggaggaaccagaaatacaaacattggggaaaacatcatggaaggagcaataggctagtgtggcagccttgagaagtggctggcccagtttgaatgaccagatggtaagccattacagggaaaagaaaactaagccagcaattttccaagggcatgaggaatatttcattttttcttatttttatatggaaggtattggacaagataattgccaatgattattatatactaaaaaaattcagaaatctgtggtcaagatggttccttaatcccaacttaactatgaaacattgactctttcaagtcctttagtagaaaattcccaaagcttggggagttgcacttctggctgaatggggttgtaggtgtggcagttgttacaatgttctgtttagaaaagctaacagtaacacctttcatatatgtgagagctagacaaacatgtctaaattacacattcataagacttccattggagagagaaaaaggaagatatacaaaatttaatacatataaattaaagcttattttctttcactgtggtccaaaactttaattagaagagctttggtggaaataagtcaggtaattaatttttatgggattaaagatactaaatagtcatggtatagtaaatatagtatatttgtatttgtctacctcaggcataatatgtatatttctacttagaaattctgagttagaattgacatattaacttccacttaatgcaaatcaactgtgaaaatagcttatatatgctttaaatatttaatattttaaaatagtataaaatgtaatgaaataaacatgaaatatcaatgctagaatcaagaacaacagccttgaaggatgatcagagtaaaatcagggtttttttggcatgaaattgtagtttttaattgtagttttaatataatttgtgcactgctgtatccaatactgaaaaccatataataataaaaaccatcaaatcatatctctatttcaccttcttaaatatggtttaagaatagtctgggccaccttgagtagaatatgtacatttctctacagaaattctaagttgaaattgacatattgactcccacttgtgcaaacagctgttaaatgatatatttcatataacttatttatttaatacatatgaataactactacatgtcctaggtgctagactatggcacaaatattacaaaatccctgtcatccttaaagtagacaatagacaacaaattaatatacatattttatcaggtgataataagttctgtggagaaaaacaaagatggggggtggttaaggagcctgggaaaggtaaggagcctgggagagggaggtatgcaattttacaagatgtggtcaggaaagtcctctctgttgaggtgatttttgagcagagacctgagggaagctaggtaaatgcattacaggcagacaggattgtcaggacaaagtctgtggggcagggcaagacaactaggaggcctgtgtggctggagcaagttgagggagagatcagaaaagacaaagccaggaagatgtatgtgtgtgtgtgtgtgtgtgtgtgtgtgcatgtgcgtgtgtgtgtgtgtgtgtgtgtttgggggaagaggttttaactttgattcagaatgagatggaagcctttgacaggttttgagaagtgtgacatggtctgagttttattttaagaagatcatactctggctgccatgttgaaaacagacggtagaatggcaagtgtggagatacatatagcagattggaagctatttcaacaattaagaaagataactggcttggcccggcgtggaagaagtaggtaggagaaggggaagtatagttaaggcttggttataatttactgataggggtgtgtgtgtgtgtgtgtgtgtgtgtgtgtgtgtgtgtgtgtgtgtatgtgtgtaaaaggaaagaaaggaaaagaaattgaagatgtttggtcttagcaacccaaattatagtgcttctattgagtgaagtggggtttctggggaaggagcaggtttgaaggttgtaaatccagagtttgttttaagacagattaagttggagagaatctattaaagcttcaagtggagtacaaaaacatagtgtacttgtgtttgtctaccttgagtataatttgtacatttctctatagagattctgagttagagtggacatattaactctcttttgtggctgaagctggagaaatagatttgtgaattgtcagtcaatggatgaccagctagggcagaatggaacagtctgaggattgaattggacaaattagaaggaatcagaaaaggacactgaagaaaggtgagtccataggaagaagaatagaaatggtcccagaaaccaaggaaagagatggtgcaatcacaattaagagtactctaaagtttatattaataactgacattagttatttaagaggactcaacaacttgttgtggctacatattggagaacactgggaataagctttgtggcagctgtcagcttcagcagaccttggaaaggaaaatggtttgccttagttttacagtttgttttgagaaagaaaaccattcatttgtatcctttctaagttgcaatataaataactgtcattgttcttgtattcttcacaataatgtccattaaacatatatgtatcacatattttacctcactagggactaaggcattgcattatgtcaggattgtattacttttccctctcatattcgtgtcttactcttaataggaagtatgagtaaatcaggtatttttctaaaggtaattttcatttatttagaacacatttctttttggtgacataaattatcaggaacatcatcactccggaaaaaatacagtgggggttctcttgtacataatcctttgaaaataacattgaactaaacatgaaacatacatttatttctctgaaataatttctcttgaatatttctacaaaagtaatttttccccacatctgttattgtctttaatctcctagtccccagaactatctataaccaagttagttccattatttaatctctactcatcacaccacacaaaccccaaaatacgggtagtcagtcacaaaatataatctatgagaatgctttttttcctgaacttttatataatatttgaaggagaaaaggacaatggtggccctcccctgcaagctgtgcttcgcagcctgcctaatacaccaagacctaaggtaagtggaaaataatctatgcaacaagctcacatgtcatcaggaaatactaattagcattttctataacaacaaaacaaaggtgtgtgtatatacaaccgtattacaagaatgagctactctgcccttgacatattttaaccagtagctttattaatgtgagaaaagttttgaatttgctgccaagttcatgcaaaacaaaaaaaagtcccagacatacagtgaacaataagacatataataactctggtcaaaacatgtgccaactgcacttattaaaaggtaaactgtagggaaataagagtgttcccagggtaaaatcgatgcatttaataactagagtctgacaagccaatgcaatgtacatataatttggttttaaaacctacttaaaacaccatttaatcacattgttgtttcaccattaattgttaacactgatatgtttgaaatattttttaagagatggttctagatattggcaacatttagtaaatacttttaagagtcacagcatacattgggaatatagtattttttgcaaatctataaaactacatagattccttttttttttctttttgagacagagtctcactctaccatccaggctggagtgcaatggtgcaatctcacctcactgcaacctccacctcctgggttcaagcaattttcctgcctcagcctcccaagtagctgggaccacaggggtgcaccaccatgcccggctaatttttttttttttttttttttttttttttagtagagagggggtttcatcattttggccaggctggtcttgaactattggtctcaagtgatccatctgcctcgggctcccaaagtgctgggattacaggtgtgagccaccatgcccggccatccttcttgaagaagtctttcattacacggctggaggtcaaaggaggaagagaaaaactaatgtatagattgaattctactttgacatctacgactggctagcaaatttatgtagagcatgatactaatgaaaacaaagtcacaggcttgattctgatctgtgtcattaacctcattctgtttcatgtttccaagctgaactctaaccatcagcttgtgactcatggcttagctggtctcaatggggaacaaaccagagagtctatggatcaacacaaagctataactgcttcatgaaaagaactttgcagggcactgatcaccctctctgacaaatgaaggcaacttattacttaagagctacaagaggtagtgaaaggccagtaaactgtgatacagaagacctggactccaatcccaattttaggatccctaaatttataacctataatatatcaattaaactctctgacttttaatgtccttattcattatttcatattaatactcttctaacatagccctgaatatttagggcttcaaataatatgtgacttggttgctcttgtgttgtaagcttttagtacatacttgacacttgcttaataaaatatttgctgaacaaattgttaaaatgaatttgaaagactgaagcacattatttcaatgcaacttatttaatctaaaagaccatttgtaaacatttaatataacctaatattcttgtcaatatctttatagattttgttatataaaaatagattgtttattaaaataatatagaataaaatgttacgattgcatctctttttacaaactgctataaacatttaatgtaattaaaattagcttatatagaaaatccaaacacataatcagtttaaattcaatcagttgctaaaactagtgacctatagttttatactatacacaatcaattacacaaaaaagagaaaatttgtgggataaatttggagaaaaatagtattatatttaataatgataaaaatatataaccatcatttgaaataaaattattttctgttatggtttgaaagataaataacattaaaaaaataagctttatactcaagtcagttactggcacacttggactctgctttaaaaaagtgtatgtgtatatgtgtgtgtattttttttttaaagaggcacctgtttgtgcaatagttaaatgtcattcaaacaattatttaatgttgactacctgattatctggaaacctttcaaatgataccaaagcctgaaatagattttctttttgggatgtggcagacagatatcagggtaaccctcatgattctttcctcctggtattcacaactgtttatattttcctcatcttgaatatgggcaggaactttaagttgcttctaacaaataagatgtggcaaaagtgatgccctgtcactcttatgcttatgctatataaaatccagtcatactagcaaactcactctcttcctctcttgctggatttgaagaagcaggctgcttgttgtaaagggtctatggcgagggcaaggtagtagcgaactgaggatggcttctaagagctaatgtaacctctgatacgtaacctctgatataagtaacagccaccaagaagttgcgaccgtcagtcttgcggctgcaaggaaattaattctctcattatcatgagtgacctcaggagttgatccatcaccagtggtgcctccagatgaaaactgaaccctagtgaccttagattgcagccttgcagaggaccagctaggccatgcctagactcctgacccttggaaactgtgagatagtaagtgtgtgttgttttaacccagtaaatttttgaatagttgaaatattcaaggaagcaaaattattctgacaagaatattgcagactcaaaaatatatacatgtatacatagagatatgtaagtacaaacaaactggctttttgtggggagaacagatgaatttagttaaaacaaaaccttttttaaaaaaacaggttgattcaaattaaaaagtattgttctcgaattgataacagttggatagactcagcaaaatactccccaagcaggttggtaacgtcaagtctccttagtttatatccatgaaatagctaattgccaatgccagtctaagagttttagcctggatttaagatgtgtgcttaaagtaaggctatagaaatattctcagctcaagaatattattcagttttcaccttcctttctccaactacagtcattcttaggcaccaattaaaatgtgtaccatacaatctgcatggactttctaggaggtttattctttcattagatatgaaagaattccaggccctcattatcaaaaagtgggattaactgtatctgtactttatgcataaatggtcatccctatgtaggtaactactacccattctcaaattgaggtcagattcacatcctctaaaagccatatctgacattgttccatctaatctgatttagacactttttatcagtgcttgaagagcactccatgcaaaccactgaacctggtaatcatgcaccatctgttccttttcttccttcttgtgggaaagaccctccctatttttcttcggccctcaggtcagtgcctgccacaaagtagacactgaataaacatttgggaacttttatttttcaaattggttttacatgtatatgcgcatatattttaacctctcaaatgtccaaggaataatgtggcaaagattaatttggtctgttgagagaaagacagagcagatgctttgttataataacatagccctattattaaatgaggcatattatatatctatttcttctatgtacatggtaaattttaattaatattctctgataacaaaagatataagtatgaaatcttgaattgagattatgtaaaataaaatttattgtttaaatattttaaaatacactaaaaccataagtaaaatttagacaaaaccctaatgttgtgctagcaataacaatatatgctggggcattgatgaggctcatgaagaggcatatcttttttgtcttgtttctgatccagatgtaaccctgtcagctttaatgtcctatcccagttcacaactcacataactctgtatggctgcagataagaataccgaaattattaagctaattataaataacttataattcttatctctgccatttccaagcccattctccaaagtaaaataactgtatttctattacaaacactatttttgttctaatatattattctacaatcctgtggaaatgctgatgtgttgaatgtacaattctcctttaatgtaaattggctttgtggtattttatatttgcagctaaaaatatattggaaaaccttcttcagctgaaacagggagtattttttcgtctacctggctttgaactagcagtatgtaacatacagagttagttggaagatagtccttattatgaaatagtggttaggggaacagaccctggagccacattatccaggcttgaatcctggtcgtgtgacttttggtaagccacttaacttctctgaacttcagtttcttcatctggaaaggataataactttgtagggacacggatgaaactggaaaccatcattctgagcaaagtatagcaaggacagaaaaccaaacactgcatgttctcactcataggtgggaactgaacaatgagaacacttggacacaggaaggggaacatcacacactggggcctgtcatgtggtggggggaggggggagggggagggaaagcattaggagatatacctaatgtaaatgacgagttaatgggtgcagtaaaccaacatggcaatgtatacctatgtaacaaacctgcacgttgtgcacatgtaccctagaacttaaagtatattaaaaaaagtgtctacctcatagtgttggtgtgaacattaagtacggtaatgggtgtataatgctaagaatagtacctgccacataaaacatccttactaaatgttaactacttaattacctgtctcatacataagctctatgatgtcaatatttcaaagtgggcaggatattaagtgtaataattaaaaattattattattagggttgctaaaatataacatgtctaatgttcaaaataatttaggcaaaaaattaatgttttttgcaaactttttttaaaacacgaaaacagcataatggccattcatataatatgaacattattaagtagtgttaattctcattaaatataataaggcctaacatttgaaatcaaaagttgaggttattgagaatttcaacaaaagaaatgggatagatatgagtactacagtgccagatacgcaatattgatttatagaaaaaaaacatggactattaaatatatcactgatttttgttgtaaccatatcattgatttttgttgtttgaaatgtgatgttgatgatagtctcttgggtagattaattgctggttgctggttaaatactgtactcagacagtattgattaatagcttgagattaacctggaaacatgattcaaaggacatccagaattctaattttgcattttaaccaacaacctgggtgaagataaggaagtctggtttatcaattttgtgggtaacagggcaacatgttacagaataaaaattattttggaaaggcagagcaagatgaccaaatagaagcctccaccaatcatcctccttgtaggaatacaaaatttaacaatgatccacacaaaaaggtaccatctaagaaccaaaaatcaggtgagcaatctctgtacctggtttaagctatatatcagtgaaaaaggcactgaagagggtaggaaagaaagtcttgaatggccgatgccacccctcccccatgcgtcagcagtggccacgtggcacagagagtgaatctttgtgctcgggggagggagagtgcagcgactgggggactttgctttggaactcagtgctgccctgtcacagtggaaagcaacactgggcagaactcagctagcgccagtggagggagaatatagaccagccctagccagagtgaaattgcccattccagcagtcagaatctgaaatccagcaagcctcactgccataagttaaagtgttctggggtactaaataaacttgaacgacagtctaagccacaaagactgaaattcctgggcaagtactgatgctgggatgggtttagaattagtgtttatgggggacatgtgacctagtgagacactagcaggggcagccaaaggagtgcttgtgccaccccacccccaaccctaggcagagcagcttgcagctgcaggtgagactccttccctccacctaaggagaggagagggaagagtagaggcctttgtcttgcaatttggataccagcttatccatggtaggatagggcaaaaggcagagtcatgagcccaccattacaggccttacctcctggatgacatttttagaaataccctggaccaaaagggaacctgctgccttgaagggaaggaagcagtcctggcagcattcatcatctgctgactaaagagcccttggcccctgaataatcagcagcaatagccaggtggtactcactgtgggcctggggtgagactgagaaatgctggcttcaggtgtgacccagaacattcccagctgtagtagttatgggaaaagactgcttctgcttgagaaaaggagaaagaagggtaaagaggactttgtcttttagcttaggctccagctcagccacagtagggtagagtaccaagcaggcccttgggatctcccattccaggccctggctctcggacagcagttatgaacctgccctcagcaaaagggtagcccactgctctgaagggagaatctcaggcctggtttcacttaccacaagctgactgaagagctactggatcttgagtaaacactggcagtagccaggcagcacttgccataggtctagggtggtggtagcctcagggaaagtctcctctgcttttagaaaagggagggaagaacggggaggtctttgtcttatagctttggtgccaggtcagtcacgtaaaatagaacaccaggtagcttcttaagatttctcacttcaggtcctggctcccatatggcatctctggattctcctagggcaaaggggaacttgatgtcctgaagggacagatacaagccttgttggctatgctacctgctgattgtagagccttaggaccttgagcaaacatatgcagtagccaggtactggtcattgcaggccttgagagagatccaatgctgtgttggcttcaggtctgacccagcgccatcccagtggtggtggccacaagggtgctagtgtcacccctccccaagctccaggtagctcaagacagagagagagacagaccccatttgtttggtagaaagtaaaagaagaggacaagaatctctgcctagtaatccagagaattcttctggatcttattcaagaacaccaagcggggacacctccatgggtcagcaagagccatggcattactggtcttggggtgccccctaatgcagacatagctgcagtgaacaaaaacttagatcacaatatccaagtctctttgaaaacctggaaaaccatcccaagaaaggcaggtacaaacaagcccaggctgcaaagactacactaaatacttaactcttcaacgcccagacactgatgaacacgcacaagcatcaagaccaccaaggaaaacgtgatctcaccaaacaaattaaataaggctccagtgaccaatcctggaaagacagagatgtgtcctctcaaacagaaaattcaaaatagctgttttgagaaaactcagtgaaactcaagataatacagagaaagaagtcagaatgctatcagataaatttaacaaatagattgaaataaaaagaatcaggcagaaattctgtagttgaaaagtgtaatttacatgcatcagagtctcttaatggcagaattatcaaggagaaaacagaattagtgagcttaaagacaggttatttgaaagtacacagtcagaagagacaaaagaaagaaaaacaaacaaacaaaaatgaaacacaagctcaagatctagaaaatagcctctgaagggcaaatctaagagttattggccctaaagagaaggtggagagagacatagggataaaaagtgtattcaaagggataataacagagaacttcccaaagctagggaattatatcaatattcaagtacaagaaggttatagaacaccaagcagatttaacccaaagaagactacctcaaggcatttaataatcaaactcccaaaggtcaaagataaagaaaggactctaaaagcaacaggagaaaataaacaaataatatatagtggcgctccaaaatgtctgacagcagagagtggtatgacatacacaaagtgtggaaaaaaaaaaaaaaaagatctcacctcttattctagaatagtatatccagcaaaaatatccttcatgcatggagatataaagactttctgagacaagcaaaagttgatatgtcatcaacaacagacctgtcctataagaaatgctaaagggatttcttaagaaaaggacattaatgagcaataagaatcaattaaaaatacaaaactcactgatgatagtaaatatgcagagaaacgcaggatagtataacattataattgcgatgtttaaactactaatatcttgagtagaaagactaaaagacaaaccaatcaaaaataataactacagccaggcatagtggctcatgtctctaatcccagcactttgggaggctgaagcgggcagatcacgaggtcaggagattgagaccatcctggctaacatggtgaaaccccgtctctactaaaaatacaaaaaattagctgggtgtggtggtgggcgcctgtagtcccagctactcaggaggctgaggcaggagaatggcgtgaacccaggaggcagagcttgcagtgagccaagatcacgccactgcactccagcctgggcaacagagcgagactgcatctcaaaaaaaaaagaaacaatgaaagttaaaaagtagaaagtaggaggacaaagtaaaagtgtaaaattattacttttctctttccttgtctgtttgtttatgcaatcagttttaatttgtcgtcagcttaaaataatcagttatgatatgatatttctaaaccttgtagtaacctcaaatcaaaaaacatacaactgatacacaaaaaataaaattcaagaaattaaaaacatactagcagagaaaatcacctttactaaaatgaagacaggaaggaaggaaagaagaaagaagaaaacaaagcaaccagaaaacaacaaaatggcagagtaagttctttcttaccaatgctaatattgaatatcaatggactaaactccccagtaaatacacagagtagttgaatggataaaacaacaggacccaacaatctgttgcctacaagaaatgcacttcgctgataaagacacacatgtactgaaaataaagggatagataaatatattccacgtaaatggaaaccaaaaaagaacaggaatagttacagttatatcagacaaaataaatttcaggacaaaaactataaaaagagactacatggtcactatataaggataaaagggtcaattcagcaagaagatataagaattgtaaatatatatgcactcaacactagagcatccacatatataaagcaaatattattagagctagagagagaggtagaccccaatacaataatagctggagagttcaacactccactttcagcattggacacatcatttagacaggagttcaacaaagaaacatcggacttgatcagcatgatagaccaaatggaactaatagatatttacagaagatttcatcaatggctgcagaatacatatttttttcctcagcacatgaatcagtcttaaggatagaccacatgttaggccacaaaataagtcttaaaacattaaaaaaaattgaaataatagaaagtatcttctctgaccacaatagaacaaaactagaaatcaataagaggaattttggaaactaaacaaacacatagaaattaaacaatatgctcctgaatgagcagtgagtcaatgaggaaattaaggaaattgaaacatttcttgaaacaaatggttatggaaacagaaacataccaaaacctaacgggtacagttgcaagcagtaataagagggcagtttataccctatatcaaaaaaagaagaaaaacttcaaaaacaaaaaaccctaatgatgcacctgaaagaactagaaaagcaagatcaaaccaaaccaaaaacgagcagaagaaaaggaatgatcaagatcagtgcagaagtaaatgaaattgaaatgaagaaaacaatacaaaggatcagtgaaataaaaagttgattttttgaaaagataaacaaaattgacaaacctttagccagactctgacaggatttttctaacatagcatcttaataagaagacacaaataaataaaatcagagatgaagaagggtacattacaactgatactgctgaaattagaagtatcattagaggctactataagcaactacatggcagtaaattggaaaagctagaagaaatgaataaattcctagacacatacaacctaccaagattgaaccatgaagtccaaaatccaaatagaccaatagtaagtaatgagatcaaagtaataataaacagtctcccagcaaagaaaagcccaggatctgatggcctcactgctgcattttaccaaacatttaaagaagtaataccaattttcccaatttattctgaaaaatagaagaggagagaatacttccaaacacattctatgaggtatgggagcatggaaaaaggagagtttgtcttcagcttacatagaccaaaacacatgaactaaaggaagagtggaatttagcttgtttatgatgcttctgcatttgagtgtttgagctgcagtttctcttgactaatagtattctctccatgctcttctttactccatgacacacttttacctcaacttctaacatttcctctattttctttctctcttttgtttcttaagacatctttcaagacccagttcactttttctctcaaatgcaaagcttgggcctcctttaattttcctcctctctcctcccagacctaggaggttaaattaatatagtgtgaatgtgacgaataacatcctgcattcttgtactagaataaaaactggtaaccagacaaagcacactgcagcatagtttgaaaatacccatgtggatatatttgcatatactgaaagaacatatactaaattctcatactttaagaagacacatgtgaataagaacatcaacaaagtgtactgttcatctccattaacaagaaatcttggaacttggtatttttttccttcacagacagcttgacttggtttgattcaagtgctgctttctgaattcagtgcaggtgctaattagtacgaaggcacataaatctagagaggaaggtaaatgggaaacatatggaaacagaaatgtaaccaaaagttctttttgatgatatacatggttcaacaagttttaaaacaaaactgcaagctgatggatggtaatattctacatcacttatactgaaacaaagctgccaatgtgattgtctagttgttcactacttgaatatttataaagtttacagttcacatgtggcatttccataagctgccttgattaatgaatttaattgtaaatgttatgagctgatttcttaaactgtatttcattttgtttatatgcttggtgtaaaagtaaattttcagactgaataatacccagcagatttgaatcagggacaaagctctcaagctgcgtggtgtgagcagtgcatagtgaatgtggctgcacagcaagtattgtgtttggccaaagtaaatatggggctcagtgccagatttcctgagccagtctaggccccgagttcacccaaaaattcattcaggggacttcttaaacaatcaccaaggccagacattaaaatgaaagacatttgaaactctcctccaaggacagttctttgggcacacagaatctgatggagagggagtttcaacaagttttgagcttttaaacagtagaaaaggataaaggaagaaagtaataggggaggctgaggtgggcagatgacctgaggtcaggagtttgagaccagcctggccaacatcctgagacaccgtctctaccgaaaatacaaaaattagccaggtgtggtggtgcgcgcctataatcccagctagtcggggggctgagacaggagaatcacttgaacccaggcggtggaggtcgcagtgagccgagattgtgcctctgcactccagcctgggcaacacagtgagactccatctcaaaaaaaagaaaaagaaaaagaaaataatggaagtaacttactggtcaccttccccagccccctgggtatctattttgtcttgcaaaaagatgaaatagaacaaatatggtattgattctgggccactaatctcctgtcctactcctgggactacctgttattactctctctgtatatatctctctttatattttcttataactgttgacagccccaaagttccagaccttaaaatgctccatttctatatattagaaatttctatatattagaaatttctatatattctatatacatatatattctatatatccatttctatatattagatcatatatatatccctactcatttctgcaattatcatccccaaatcagagcaaagtccattaatttaatggacattaacattttttgctgtagtaaaaagggcttaaataaggattcttttctgagtcataaaaaattagatgtacttaaagattttcaatatatgtgtgtgtgtgttatgtgtgtgtgtgtctctctctatatataattttgacttaatctgcaaatgcagcagttttgcatgtacacaggtgaagatgaatttccttttataacttttactacatgtcatccatactagtttagcttagtataagcaagaaaagtataatattgtagacatttacacaattcacttcattctccctgtccttaggtaatttatgatatcagctttagcaatctctgaggaacccaatctacacccttttcaattttaaaaaatactcacttattcccacttttttaaaaaaaccaatttctctgcctctcaaaacataggtgttcacacctatttcattttgattcaactttaaaaagtagcctttggtacaaaacttttgagttatttaaggatgtggtatctacagtctttttttttttaattcaaaattggtttgctctttatcccaaagaatccaaaaagctaaacatcatgttctctttggatgttattttctataatatgttaagtgtctgaaaatgtgaaaaatttaagcaagcacacaggcacttggttaataaagtgggaatgtgttcatctgtgaaatacttcttatacatacttatttccatcatatttggagaggatttttctaacacagcatcttaatggattattagtagacctgactctaggcttagttactgcctaagacaagcccaccttacaaaagaggcttgggcacctcttcccagggaaaatgcttcctttcaaagttaatgaacaaggaagctctagctgtctctggaaaccataatgtaagtttgagcagtgcaatcacgtagtcttgaaaaaatgttagcttcatgcaaatataatcttcatgcctagagcatctctgaccaaagtatagtgagccctagtctcaaggtacctgttagtggattaaaaatcggccccatcgcctgtagtcccagctactcgggaggctgaggcaggagaatggcgtgaacccgggaggcggagcttgcagtgagccgagatcgtgccactgcacttccagtctgggcaacagagcgagactccgtctccaaaaaaaaaaaaaaaaaaaaaaaccggccccataacatatatgtccatctggaacctgtaaatgtgaacttatttggaaaaaggatctttgcagatgtaattcaattaaggatctcaaggtgaaatcatcctggattagggtggagtttaaatccaatgataagtgcccttagaagagaacagaagaagtgaagagaatcagagagagaaaaagaccatgtactgatggagatctctacttccatcaactcagattggagttatgatgccacaagttaaggaatgcctggaatcaacagaagcaaggagagaggcaaggaaaggactctttcctaaagtctccagaaccaacaagtcctgctaacaccttgattttaggcttctgacctccagagctgtgagagaataaatttctgttgttttaaaccacccagcttacagtcatttgttaaagaatccttaggaaactaatatagaatcaatcttaaatgagggctcagctcttccagtggtgtctgtgctaagaaaggggaagaaaaccaggcagagtaggggccccattgctcaaggagagaaacttattcccactgtctttttaaagagaagcaggaattttttatttagagtcattgaaagaaatgattgtttgaaacaataatacgcagaggtatgactattgccagaaatgattgtttcaaacaataatatgcagtggtatgagtaaacaaactttcatcttgtatattaaagtactggtaattttaggcttcaagctagaaaaaaatattcaggattacagtgattgtaataaaaatatgaaagatttctaatattctggggattcttgtctctcccttttgaaagctttcaaggaaaacaaatactgcattgaaaaaaatgttccatatttattttactatttatgaattaaacaatgttgggacaatatgaattttaatcaaagcaatacttttcaagaagagagaactgtacaaactatttatcttttccattttgtctatcaacatgtttggacaatgaaaactttacatatgtaattttaaagtttaaattatgcttatgaccatttcatgtaagtttctttcaaaatagtatttgttttaaggctttatttgttatataaaagagtaaaatagtgctacaaaaatttgtgtatgttgattaatttggtttacatgctgcctagtccattttctgttgcttataacagaatacctgaaactttcttacagttacggaggctaagaaatctaaggtcaaggggctgcatctggtgagcaccttcttgctggtggggaccctccacagagtccaaagttggcacaaggtttcacatggcaaggggactgagcatgccagctcaggtctctcttcctctccttccagtcccaatcccatgaaaacctattaatccagaaatcaattaatctattcttgagagcagaaccctcatgacccaatcacctcttaaaggtctcacttctctatactgacacttttcttcttcttcttttttttttttttttttcttttttgagacggagtctcactctgtcgcccaggctggagtgcagtggtgcaatctcagctcactgcaagctccgcctcccaggttcacaccattctcctgcctcagcctcctgagtagctaggactacaggcacctgccaccatacccggctaattttttgtgattttagcagagatggggtttcaccgtgttagccaggatggtcttgatctcctgacctcgtaatctgcccgccttggcctcccaaagtgctgggattacaggcctgagccactgtggggcgcggccatggattaaatcttaacatgagttttagagaagacaaatattcaagccatggcacatatgcctttctgatcctgccatacactctaaacagcattaaaaggtattttacttttagaaaccatccacattcaggtaggtcaagtgttaaaagcatagccatcacgacttttatgatagtataaatagaaaataggatttttataacttaagttgtctcctgtcaaaaatgcagttcaactcaacagataatgtattgagcactgactataccaacaaagaaataaacatgttatggtcacaattattaaggagctttctacctaaagtggcaggaggagtctctgagggataatagagagagctgacattcactgacagttttctactttgcaactcttgtttactaatttcatatgcaccattacatttaatcctaataaaaatcataaagtagctactattagtaagttcatttgcttagctactattattaagtcctcaggtgaggaaactgaggcagagtggggttaagtaacctgcctaaggtccaaagtaagtggtaatctgactttcaagtttgtactttgtacttcaagccatcacactgtaaagacctccccaccatcatcagtaaccaaagattgtgataaatgattttatttctatgcactaggaacacagaggaggaaatgatgatttatcccaacttggaggaatctggaaagtcggtagataccaaatcgattctacactggacttagaaagacagagagaaaattcatacatggagggaaacatttcagatgaagagattagtcaacaaaattgggaaatctataaagaatatttccctagaaaatttctgtgcaattttagaacataaggaaaatttctacattccaatttttgccacctatctgtcatccccagggagcagctaaccctttagaaatggtgaaatctcccttttctggggcagcaacaggcttctggagccataccaaaacactatgggactcagaagttttgaggtggctatctggtctcctgcaccattgctttgaaataggattcagaaaatttgtagctggaacaccttgtactgcacacttaatgcctcaaattcaagtgattttcctcaggttcaaagtcctgaccctgctcagattaattcagtggatttgattgctagcactaaggcagaggaaaacattacagtttgagaagatacttccataattattgatatgtctctaaactaatgtgtcatttactcttaacgctgaaagttttaaagtcgtgatttcctatctctgttcaattaagggtagaacactatggaaatgtcttcagagtaaacatgatgttgagaaagaaatcatagcatcaaacagcttttggaatcctacagtgaaacactatactcactttaaagtttgaaaaagctcaatggagtaatcttttagcattcaacagacattttaaacttgtactgagagcagggctcctactatgtgccaagactctaactaaatgattttatagaaattatctatgtcctcacacttatgtgaggtagctattcttacattcatttgataggtcaggaaacaggattcctaagaaaataacttgcttaaagtcccctaactcacacatgatagattaaggaattgaactctcttttcttccatattgtaattaacaaaaatgtttgaagctatatgattcttcccttaaaacgttttctagatagatgtaaaaggagatatatatatatatatatattaataagcattcatataaaagataataattttgcgcattttatggggctgccattatgcaaattagttaacttttggctggttgacccaagacaactgcaggactgcagaattcctctgagagactgaagtgctatcaagcttaggaaaacacttaaaaacctatttgattatagaaggtgagggttttctttttctttttattttttttgagacagagtctcaatctatcctccaggctggagtgcagtggtaccatctcagctcactgcaacttccgcctcccaggctcaaacgattctcctgccccagcctccaggcactggccaccatacctggctaatttttgtatttttagtagagacagggttttaccatgttggccaggctggtctcaaactcttgacttcaggtgatccgcccaccttggcctctcaaagcgctggaaagtttaaacagtaacaaaagaggggaaattactgcataacgaagtaaaaggcattgagttttgtcatttttgtgagggttatgatactggtagaagagatgcaagaggaagtatctggaggtgaggagttctgtgtccatggacagacttggtcagggagtgtctgatacatgtctaagggctgtggttctatcactctaattccagttgattcctgcttctgctataattgccctgcataatccccaaaactttcaataaaattttattactgacaacaacctgctgtgagtggtgtttggaggaataatggagaagagatggagccttgaagtttcagatagtggcagatatttgcatagatctataatatatagtgcagcatgggctgtcttctaaatagcaaagaatatgcattatagcagtgcagaggagggaccaatcactttcaggtaagggattagagaatataccacaaaagttgtagcatttcgtgtaggccttaaaagatatgcaacatttgaataagcaaagattggtacgagatctttagattcagagtgaaatggcatggaggttgggagtttccaggcacattctggaaacaggattcaggcaaacttaagtcaaccacatatttaaaagcaatggaagatataggtacaaaaaaatattgaagttggagagacgacaattttcaatgtcagaataaagagttaaaaatttattccaccgtaaatataatcactgaaaattttgataaagggaacaatataacctggtggttgtgggcagatggcttggggcctaacagtaagaagtatatgaattctggtttttgacatgttgagtttaaagggctgtgaggtcataagtatccaatccattgggcatagaagaataaaacttagaaaagactttggaatgaaagacactgatgcagaagtgtatagagagctgaatttaatgtttgaatatgtggcagtggatgggagttcccaaggagaagaaagtaagagagatgagaaaatgtcagagaacaggatttgggcatgacttaggggttgagaaatggagactcaagacagtaaaagtcagaaaacaaggagagctttttaggaaggttgaggtgatttaatgtgttatggaagataaaaactgaaaaaagtcagaggagtactacttcctcatttgataaaaaaggggtaaaaaataaagacattgtgaatgatttaggaatacacaacatacagagaaatgaaccgaagcattttaagtttaaaatgtgtgtaattcaattcttgcaaagttggcttttaatttattttccctttgtattaaagaagtttgcatccagaacacattttagtgaatacaaaaatgggtagataaaaacaaaaatagcaaaaaatctttaagtcactattgctaaaaccaactatatccttgttacttaaagagtagtctgaggaccagcagatttagcatcgtttaggagcttgttagaaatgcagcacttcatccatgtccctacaaaggacatgaactcatcattttttatggctgcatagtattccatggtgtatatgtgccacattttcttaatccagtctatcattggtggacatttgggttggttccaagtctttgctattgtgaatagtgccacaataaacatacctgtgcatgtgtctttatagcagcatgttttataatcctttgggtatatacccagtaacagaatggctgggtcaaatggtatttctagttctagatccctgaggaattgccacactgacttccatgatggttgaactagtttacagtcccaccaacggtgtaaaccatcattctcagcaaactatcgcaaggacaaaaaaccaaacaccgcatgttctcactcataggtgggaattgaacaatgagaacacatggacacgggaaggggaacattacacaccggggcctgttgtggggtagggggaagggggagggatagcattaggagatatacctaatgttaaatgacgagttaatgggtgcagcacaccaacgtggcacgtgtatacatatgtaactaacctgcatgttgtgcacatgtaccctaaaacttaaagtctaaaaaaaaagaaaagaaatgcagcacttcagtcccattctagactccctgatcagcatctgaattttaatgtgatcctcaggtgattcatttattaatgtttgagaagcactgctgcacaaaatactattttgtcatacatataagcttaatgatatacatgatatgatacatgagatgttcaataatctgtctatagattcctgccttcacattgtgagataataactgggttctgagactggattttagtgctcaggtctgccactccatagctgtgagaaaaatctcactctcccatctttcagtttcattgcaaaagcagtagtcacatccaatcctatattgttattttaaataaatcatgtttaagggatatggcccctgctccttagaatctgtaatgtaacattgacatcatgatagggagaaagacactcatggcatatattaaataaaagcaaaatgcacaatgcatgtatcttttaatgacaaaataaagataagaatggcttagaaaaaacatttttagagttccaaggttgaggagaaactgctattatttgttcctccatcatgtagttcaaagttttctggagagaatagtctcttacttaatgcaaaagaggaagctcagcaaacctctaatgatggcagtaaatagcatatttggaatgcttactacctggcagatgaattgtcatgcatatctcctttaatcctcacaacaacctgaagagacaagcagcactagttatcatccccatttacagataggaaaatggaggcttagatacattagtcactggctcaaggtaatagagtttacaagaggtggaactgaaatccaaaccaggtctgtcaaacatggaaagtagaattcttaagtatcctcaatgaggaattagagatagacataaaataatatatacgctaacatatatggacataaaataatataaactaacatatattaaatccttgtaaacacactatcatataggcactgttattatccctgctttataggtgagtgtattagtcagcttaggttgtcataacaaaataccatagaatgggtagttaaacaacatttattttctcacagttctagaggctgcaagtctgagatctgtgtgtcagcatggtcaggttctggtgaagactcttttccagtttgcagatagctaccttctcactgtgtcctcacaaggactttccctggtgcaggcaagtagagaaagaaaaagagaaaactcttccccttcttataaggccactaatcctattgaattaagaccctacatttatgacttcatttaactttacctcctaaaggccctctctcctcacacagttgcctcaacatttgaatttggggggaacacaaatctgtccatagcagtaagaatcactatccaagaatgattacataactttctcaaggtcacacagtggtgaatgatggagtttcaatttgaatcatggcaggctggctcaagagaccatacttagctgcgatcttatgcttcctctaaggatcaatgaaaagagggcatattaggtatgacatagctgtctccattaacggtttctctctactcaatactttattgtgatttcttgtttaacaacgtgcttttattccaatctaatttcctcccaaattatctgttttctattagtggaactgtaacagcatgacttttccttttccaaaaccagtacaactaacaaatgtaacatgggagaaaataggctaaattgtattgactacgtgctattagcttctagggacagatttattaaatagcacccttcaattgcattcaggttttcagaaaacctattattctataccatccttcactttgtatcattgctaagggtctcttcactcagttaagtcactagaagtgccaattaaaggtgaaattaaggaagctcagttcacacacttgcagggacactggtgtttacctgctaatggatagacaatgggctgaaaagagggattaaagcagtttttattttcttaagtcagatccagctctttctggactgcatatcaaccaatacagcctggaattttaaaaatgaagaatatgcaatccagccaagatgacctatatgtctaaaaccatatgctgaactgcttactccaaggatatttctacattataggccaaaaaggcttcagacagaagcatggatatgctaataatcaggtctgccactctaatcatctcctctggttccttgacacacatcctccacttcaaggaggctgatcactcctcactgccctgggcacacgttcatacatacttcttgattatgtttattttgtctttcctgctagcaaggcctacccattcaatctgtccaaatttcatctttcagcctcgttcaattattaaatatcatatcctcttgaatttttctgtcagcccttcagattcaattttaactttaatcacatacagctctacattaaaatgtcagtaaggagacttctactggtcacatgtatctaattcttctttcctcctcaatgcatgagatgattacctatttcccctttacaaatgggcaggaccatgagactagttatggccaatggattgtatatgaagataaagtatgtcatttcctagctggaatatttaattgccagagtgaaacccttcttaacttctcttctgctggactttgaaaatagacaatattccaagtggtagcctccgtcagccaaggtctgtaataaagatgaggtagggcggagtatcctgttaaagcacaagaatgcagtgtgcacaagaaataagcctttttggtgtaagccaccaaaattgatgagtgtagctatgtgtgtgtgtagtaaggagtgttaatatagttgaacctaacttattctaactaaagtatcttctgctttgagattatatattttatgcttctaagggtcttcatttattctacactcaacaaatatttatcagagcacctactgtgggtcagtgaatggcctaggcactgaggacacaatggcaagcaaaacatataaagcccttgagctaatggtgattatatctagtgaggaagataaatgcactccaaataattacatgaataaatacaaattttaaaccaaagtcagtgccttgaagaaaaaatacatctgacctcgtgaggaggactgtgctgaggtgtcagagaaggcctttctgaggaagagatttctgagcggtgttacaaagacaaacgaagggcaaattaggtaaagtctggcaggggtgaggagaagagtatttcaggtagaggatgcagcaggtctgcatgttttcaggcagtggggagcataactaatgtgaaggaaggaaggaaagcagacgggggtacctaactgtagaggaccttgtaggccaacctaaggattgtgaactttatcctaagagaaaatggaatggaagcgacggaagaatttaaagatggtagaaagagggtatcatcacaccttcactgtgacatggggaagttccctctcaagtttagcttctaatataaaaactcatgacaccaattctttggtatgatcagagaaggatttttattactcatacaagtggacagtcccatatcaaggaatggggaccagctctctggaaggaagtccataacagagagagaaagagcatagggtgcacaggccttttatgagagaagtccctctggtggcacctggaagagacaactagagaacccccgcacttggagggtgaggaggctgtgctttatcatggagcttcaggaagtgacagatccaggcatgaaatgaggtttagaggttactagcatcaactcaagcaccacaggagtttcggtttctttcctatggtctccatagaagaagggggaggcacataccatgattagatttgaatttcaaaggattttttctggctacagtgtagagattagattggataccagttaggagggtgctcctaatttgggcaccagataggagacttgtgcagtaatccatgtgagagatgatggcagattacactacagtactggtggtggaggtagagagaggaggacacaaacgaaaggtatttaaatgggtttggttttcaatatgatggggtggggtgataagcagggagctgttagagatttatctcagagttttgattttgaaagtagatgtttgatggtatcattcactgaaatagagaacactgggagatagagggagttaatttttggtagtatttaatcaaaagtgcctttgagacatatggatagagatttcaaaaaggctgaatgatacacaggtccggagctcagagggaaggcctaagttgaagataaaatgtgtgagtcctgtatacatgacagggaattaaaactaggtgtagagatattaacttgagaaaaaataggtggatctatgacttgagggacttgaacatttagaggacatgacacattgcacactggctgcattcattctcctctccatctctctattaaatccaacatctgggtccctctcacccatagtttctgccatctggttcttttatcctgtgtatgggttatattttttgtttctttccatgctttgtgatctttggttggaaagtggatattgcagataatatactgtagcaactcttcttactccccctaccaccacccagggcttgctattattctttggttgtttagtgaggggctggattattttaataagtatatttccttcacagtcaggtgagttaatttccctcagttaagtcactgagtttgctatcagggaggtacatctttgggtatgtccacagacagcccagccggcatgagagtgatgttcgtgtgattgtccttcactctttccttaaccacattcagctgttcaactccactaattggtgaacaattgctgtgttattttcaacagtgctttacaaccttatattgttcaacacactaatacaatcgaattgtgtctcctttgaagaaatagttcgaagtcagggctcctcccagctgtgttatttctctggttctctcctgcaaactagtctgcaatttagcctgtatcttgactctcctcccaattgcctttcaccatagcttccactgttcttgagcgcactctaaggcttgaacttttccatactttgttgcaaatgaagccatgccctttgggaagagattaagaatatttattttatgatggattattgcccccgccaccaccaggcaaaatctctaagccatgtttctcaagatggaggtggagaaaatggagaggttcttcctgcatgactgcatgaaactcccactctaggagcttagcttagttgggaggtggcagcactctaatatcttctatatttatctctcctggtgtggaacccccacctcaggaggccaggcaaggatgatgaggcctctgtattcttagcatgcagtgcctaaggtatcccctccattcaatgatgggggatttggcaggggaggaagcccctacctctctactgtattcaccagagcttagccttagcaatgggtaactatggccaggatgagaaacactgaagttctgttccttccaggaagaaaccttccagctggaggggagagagctctgtgttcttgattgcaccagcctggaatggaagctccatctccctgaacttggaagggggtgagagggagcagtcttggtttaaataccacaggcttgcctttcttattgaattttcataaatgttcttgaatagatgtttcttcatttgctatttgtccttaggatcatttccagaggatttaagtgcttggagtttttatttgtttgatcatagttttcactagttttactggggagtgggttaaaggaagccctcaagatgttatgccaaaagtcttctctctctgtatttctgccttcagtaggctcttcccatgtgactctgggcattggccaagagagtgctagcaaatgtgatataagcaaaagcttaagaaaagcttgctctgtgaggtttgccctctgtcagcatggaagccctttaatcagcatttgaaaaagtctgagctagtgtcctggacacagtgagagaatatggtaagaaagtggagagaaaggctgcagctattccaggagacccaggcttcacagatcaagccgagagagaatagtgtcagaggagccaggagaagaacacacttcaaattgtgagaaatcaaggaagagaagaattgcaatattcattacatttagaactatccaggttattgttcttcttactaaaaatgattttattggtaaaatgggaacaagagacagactagaataggatcggctgtgatagggaagtgaggaatatagctagagagaataggcaaaactgggcaagtgtggctttgcaagggagacaagagatgaggcagtcattagaatagtggttcctaactggggtggggggtgggcatctttccaggagatatttggcaatgtctagagacaactttgattgccacaacttgtggggcgagggacacaatattttcatgggtaaagaatgctgctaaatatcccaaaacgcacagaacagccccaaagtaaagaattatctagccccaaacgtcaagagaaaccctaacatagggaaataagtggttgaaggtgaggtttttgttttgtttgtttttaatgcagaagacacttgaatgtattttgagtctcatggaaagtatctagttgagagaaaggttaaaggtacagaagagaaaggtgtaattttccaaaggtaacaattattattattattatccttttttttttacagatgaggagactgagagggtaagtgattagtcccaggtgaagaaggcagtggagctcagattccaatgttggcctatttgactgcaggccaagttgctaaaggagttctttgtccttctgctgtactcccaacacaatggcatcaataccaaaaacacacccaagctaatatcatagatatctcttactcaccttctaaactctctactcttccatcagacccacattttctttattgaaccaccttattagcttattgttaagtctgagtgtatcatttagggaagagaccttcacttatagtttaggtttcaatcctcagtaccatttgtagccatttggcttctgcataatttcctctttgagactcatctgtctaaagatttcacctctgcttagccgcgcctttccttgaaatactctgcagttccagcaactgacagctcgtgcgggcagcactgaaaaatggaccaacccaattgaaagctgaactctctcctgaatctggttctggactctgacccttttttaggtgttccaattgttccctgcccctaaggaatgagattgcagaattccaaacactaccatttttcaatatctaagtcctttaattgtgcagtaacaataaccgtgcagttagaggagtgccctagaagcacttatactataccccagggactattatggcagacgaagggaagcaagaagatgaatggcaaatgaggaaatgcagggaggaaaggtcacttggagccaaacaatgcactaaaatgctgacatatctatgcaaagaacttttacaacctatacccatgaggcacaaacagatccttaaagtgtccagggaatgtcaaccttcctttcaggaaatttgtctcaactcagaggagactaaggaagtgttaacttaatgccgtggagtcaagtgtggaagattaagaagagtcatgtgtctgctttgttgctttaacagattctgtacctgagctatttttaaaatttctttgaatacatttcatgaactcctttttctatttattccagcttttgatacttttccatctgataaaattttgcattaggattgtatctgggcatactttaggattgtatctgggcatgctttttttttgtttttgttcgtttgtttgtttgttgttttgagacggagtctcgctctgtcgcccagtctgtagtgcagtggcgccatctcggctaactgcaagctccgcctccggggttgacgccattctcctgcctcacctcccgagtagctgggattacacgcccccaccaccacgcccggctaattttttgtatttttagtagagacagggtttcaccgtgttagccacaatggtctcgatctcctgacctcatgatctgcccaccttggcctcccaaagtgctgggattacaggcgtgagccaccgcacccagcagtatctgggcatgcttttaaacaacccagtgcaattcaccctttacttaatgatgaaggtatccttcagcactaacccctcatggacttgaggtatttctccttcctccctgccatcttcctttcccctttctactatctccttttctcttcttcctctatacctactttccctcttcctgctcttcctccttccctccatcttaatcttctttactctgcagtcttcgcagaatttaaactctgatgtgtttaaacccaaatctcacaaagaatatagactatataaagtataaataaccaccctggactatacagttatttttaatttaagatatacactgttacatgttaaaatttcaaagtgcagcattttctaggatattattaagtatattaatctattgagaagcaataaaatttcactattattactttgccaagtttttctgttgcttcttttgaaagtgcataaaagtagtttagttaatttttccgtgcttcagtgtattcaatactgcattattggagcagaataaatggttgaaatggcaatttgccacaaactcttctaccactttgagaggagtatatcagaagagagtatcatttactgttgactaaaacattaaaagatggaagaataatatttgaattaagtgcttttcatgaaaaaccagtaaaaatctaccagaaaaatattgaaaacactttggatccagcccagccttttattttagagcttgaattacagtttggagtttgtgctgttttccaaaagggctgaggttaagagaggtaggattcaatgaagatctaggatcttttaatctgaaaatattttatttctatacagtgactgagacaaagatattaacaatttatattaaactaaaacatggcaacatcatcttcctgtctctcttcccactgtactattgctttactcaattgttgctttattctcctttctaacatttgcgtgtcataggacctgttagagaccttgataagacataaaaataaccatcttgctggtgagaaccatgtctcaaagcctaatgccaacaaagtgatggtgaggaaaggtgacattggaaaatgccatgataaataattttgagtctctggacagactgattattgaatttctttcttaaaaatagctgaccctcctaatcaccctcacttaaaggaatgactcaaggctggtttggtgaggctatttgctcctgttgattttagggcaattgtgtagctctaacagcccctgagcagtctgcagagagcagccatttcaccacctaatcactatagaattcaaatctgaggctgacagcctaaaaacagccacccctcattttcaagtgaaaatgatgaacagctcaacagatcataatgtgtggtctcctgaacaaactgacctatgtctgagctgccttccatactgtagatggtcccatactgggcttgggggcagtattctggtttaaaatactcactctggccaatttatctatctctgtcacatctgccacccaagtgctgagactcagacaagctgtccttaccatttgcctcaagtcacagataatgatactggcaaagtggtgggcaagcaacctaccacagacaatgacagacataatgaattacttggaattaaaactcagaccccaaaacttcccatgttcagcaattattacagggaggtcgggaattagtttgtcttcaggaagctaaaagagtttaatacccactgtaccttaggttgacaagaaataagagatcagccaaagcattgtatgacaatatttgtctttcacaagtcggagtgctggaccaagagactttctaaagtatcctgggttcccaacatgctatgcattgaagaaggacacccatttttctaactttattgaaagattattcaactatagaagccatttgctctagctgtggagtccttagcatttgccaggttttaacagtgaggggcttattttgcagaatatgttttcagacccaggccttcacttgccctaagttatctattgtgaaaagcaacccatgtaaagcactctctaactgataaactgctacacgcatattaggagttatttaaattaatgagctatcatgatacccatcctgaagggccagtaactcatttttaccttgtataaccgagttgtgtattacattctagtatttattctggtccatcgagaagtctccctcttcaaactattatgttctgcacacatataacataatagctttccttgtttgctctttctcttacatccctgtttttatataactgagtttggctctagttttcaaacagaaaagttttgattctcaaacaaaatgtcaggctcctaataaggcttaggaaattctatttgttgccaatgagaccaagctggaaaccaagaattcctaaaggagtgttgcatgccagcaaacttcaaaattggttgttatgtgattacatttggctatttccaaatcatcttaaagtttcctttcctaaagggaatataactgcagttcttccagcacttttgtgtagagagcactttgccgtcttttgagtaacttcctgatatcccttggaaggcaaggctcagcaggttctttccttctctcttaacttgccatatccttcctgattcacggaaacaggagaattcctgggtatgcagctcaggactaaaaatctagtgtgggcggcccgggggaggtagctctcaggagctaggtaacagcctacagattgtaagtcttacattttgtgaggacaaaccagtccaagtagtccagttagtcagacttcccagatgctcccttgtctagatgtttagttcatcctgagcatcaagagaaaactgaaacttgtaggatatgcacacctgctgctgaaagccgataagatcttcaaagtgaaatgtagatactgatagagaggaatttatatttttcaaaggcatatttaagaggaagcttgtttaggcaactgatttacaaggatatgctaggttggctcttaagggccaggcacggtggcccatgcctgtaatcccagcactttgggaggccgaggcaggtggatcacaaggtcagaagttcaagaacagcctgaccaacatagtgacaccctgtctctactaaaaatacaaaaattagctgagcatggtggtgcacgcctataatcccagctactcaggaggctgaggcaggagaatcacttgaacccaagaggtggaggttgcagtgagctgagatggtgccactgcactccagcctgggtgacagagcaagactctgtctcaaaaaaagagtagctccaaaggcaatcaaggtagtaatttgtaatgcttgatatactgatatactctcaaagagatgtaaaaaatggacctcaaatattagcttactagcgagtgtagttaatagtgccactaatgtattgtgagtggagctcctttatataaaagtcatccaaagctaaaaataattcccactcttgagttattctaccaggttttccctatggatacttgttatattcttgggatcatattgtggcctgggttatgcctgaatttacataacaataagctaaattataatggaattctttggtgattgagtaatgccatatataagttctgtatatggagaaaccaaagcataggtatattaaattattttcttcatactgcagaaatatagtagaaaattgtatgattttctctgaggacttacagagggagaggatggtagttgtgcagagtgcaattctaattttatgctgagaatgataatggcttgctgttcttatatacagaactactgaagacagaatgagaaaaatgggatgaataaaacaatttcaggttaactattgtgaagttgaaagctcataattaacaaataaatgctgaacccctacaaatagcaagaagtctctattagaacctatggttgatgaagatatcactcacaatgcttttaacctttgagatgcttacaacttacttgggaaggcaaacccttcatgtacagaaagttaacacaggaaagagctgccaattagtgagataacttagtataaaggaggttgaattgagaatcattatgtagattctaattctgacttagccacgaactaccttaatgaccttaagcaagttacaatctccttgggccccaactggtcacctacttatagttaacatttattgaatgctcactatgtgtgccagatgtcttacacatattctctcatttcatcctcaaactgaagcaaagtaagtttaagtaactcatccaggattatactgctagtatgtggcagaggactcaaccttgtattctgaaagttaaggcagtgtcagaatgatgtatatgtgtgcatgtgtgtgtgtgcgcatgcacatttgtgtgagagagaatgtaagaatatatgataggctgggcgcggtggctcatgcctgtaatcccagcactttgggaggccaaggcgggtggatcacgaggtcaggaaatcgagaccatcctggctatcacggtgaaaccccgtcgctactaaaaatacaaaaataattagccgggcatggtggcggaagcctgtattcccagctactcaggaggctgagacaggagaatggcgtgaacctgggaggcggagcttgcagtaagccgagatcgtgccaccgcactccagcctgggcgacaaagcaagactccgtctcacaaaaaaaaaaaaaaaaaaaaagaatatacgataggttttcctggttgtattagaaacacacgtgataaagaatctaccaaactatctggtttaactatgagacatgataagtagacaattcacatcaaattgtagtggagagcccattccttgactgcctctatgaccaagtgggcctgattctctggttcaaatctttacgatatggattaattaatgtcaagtacagatatgttactatcaacattaagaaaaaacttccccataaaaagtcacctgctatattttatatttgagattacatgcattatctactctctaaatccagcaaatctgtttctgtatagacctgatttagggagatttttatgttatctttccggttttccttatataactgtagacctagcagaggacacctccatttttgtttcatttatttgctttatattattttaagaagaaacatgaaacaaagcaaatccactttatgattataacacaaaagttatgtgtttaatttacatgtgattaataagcatttaaacctattttcattgtatgagccacttcaaacatcagagttaaagcttctttaaggaagattttcaaaatagtataggcagagtacagaactggtctgatggtatctatcctaaatgttatttttattaagagatctttacatttttggtacttcatgattcatttaaaagattatagttttctgatttttgttctgcgtatctcacagtgtctttggaaaaaagccatatacctctgatctaagaccaccagcttactatgcacaaaggctaataactcagtattttcagcccagtagctaggtagttagctctatcttttgagggaaggccagataaaagtaaaagagggaactcatacttgttatcattataggtggtcatataaactcatattaatagaatttatatttgataaatgatttaatttattttataattagatcttcagtaatattcataagtattataaaatagatgctacattttcctggagggatgtggatatcttatttatctttgtgtctctcaaacacagatactcaatttttgtcaaatgaataaatggatgaatagacagatatacagataaaagaatatataattataataatgtgaacactacttgaatcaagaaaacaaagcccaggatatcacttaagatattcttggctgccctttcccttgactgagtctaggctatgaggtggataagaatatttcttctctaaaaagacttttgtagttaaagtttattttgttgttatcttttggctttctgagaaattggttttattactgtttttaatttcttcttttttcctcgttttatttctggataatttaaagcttaaataggttaaaaaagtaccagttatgattaaagaaacaagttattccagggcaactctgaatagagcaatatcttgtctagctcaaaacatttatgccaatggcataaattgagtgttacagaagaagagcaatttcaaaaaaaattgtcaatattattagcaatatttgagtccatactacatgctaggcatgattcaaagttcttcataaatattaatttatttaatcctcacaacaaacctgcgtaagaaagataatgttgtaacatttatattaatattttcatgtaatatcagcttttgtgatagatattgatagtaaatagaagaaaaaagaactaaggaatatttctttgggattataaagagtaaagattatttttctgtgtatttaggtaaatttatactattctcttatatctaatgtcaataaaaatacctaatgcaaagggattgaatttttttccccaaacacattgcaatttagagattgcactccagtgttttagaaactaaagtatggtggtcagtaactttttacttttccaaatatggacagttaaaaatccaaaacacaagtactatctactgtcaccatcatttcctcttaaaaaagatcattttaaaactaaaaagtttggaaggatataaactcacaataaagatcatttcatttaattgaacaaatttagctttgtgaaagattcatgatgtctaatttctgatttcagagcttgccaatgaaaattttaccatggactggcttcagtctttgcaatgacatttaggaaccaccaaacgttaacatgacagccacatttattactaagtttttctgaaagcagatgtaacagatgtaacctagatttagtaggcctctactttttccctccctctacatagaagccatattcagcaacttaatgtattttgtccaaaaatagatccaactctacaacccagtgggatgtttcctctaaagattataaaaatatagagaaacaattttacctcacattccacacagcaaagctccataaatatccccgttaaacatctctgttattccctcaaaatccatctcataatgtcagcctcctcacttctcctttctctgtccctgatatgattaggctttgtgcccctacccaaatctcatcttaaattataatccccataaccccttcatgtcaagggaaagaccaggtagaagtaactggatcatgggggcagtttcccccatccggctcttgtgatagtgagtgaattctaaagagatctgatagttttctaaggggctcttcccccttcactcttcactctttttcctctcacctgccaccatgtaagacatgcctcttccccttcctccatgattgtaagtttcctgaggcctcccaaggtctgtggaactgtgtcaattaaccctcttttctttataaattacccagtctcaggtatgtctttatagcagtgtgaaaactgactaatgcagcccctttatatccacagtccgtaaaattctcaccccatccaaccctgctccctctttctcgtcacttcaagctctaagctttcatgtcccacttaataaaaccctaacctggcattagctaaacctgtgtccactcctcccatagcatattatattttccaaagattaatatacagatcttcttatgttactttacgttgtgactggtagaatctatgagttggatttacgttcttttcctttgaatattgaaggatacttgttgttgatccaacccatgaagtgtggttgaagtgatgctctgtggtttccaagccaaagcataaaaaggacacagattctaacaggttcttactctctctggggatgcttgcccttggatatcagctattatgctatgaggaagttcaaactaaccctcaaggagagaactcatggagatgaactgaagtctctagcccacagccagcatcaaccaccagacatgaacaacttttcagatgatttcagccctcaacctttagagtcttccagctaaggccttagacattacataacaagagaccagctatctctaccctaccttgttcaatttcttgactcacagaaaccatgagagaataaaatattattgttttaagccacaaagctttggggtgactttatatgcagaaatagaaaactaatacatccccttaaaaaggaactccatgaccgtatattactcttatcttctacttggaggaagggagccattaatgtttcatcatcttttttctttaactgcttttcaaaatactcactaaataagttcgggtctcatgcaattaaacataaggcagtatatgttctagccacttatgtagaaatgtttacagactataagaaatggtttcatgtttatgtgagaaaagtgaaaatgggaattgggttctagttatttggaagagagatgcagcaattataaaagatattttgcgatttaatgcatcaaaatatttactggttaaatatttacattgtctagaattttttttttgtctagaatttcgaagccataaaaatgaaacaattagactattattttaggtttcatatgtttcataggaaaaaaataatgattttactggagccaactaaatttctcattaacactcacttgataaaattgaaaataaaactgaacattaatccgatcagaaaagcactcctaatgcctcagttatattcttcagtaagcttgtaaatctccatttcctaacatcatgtcacagttctcaatctactcttgacaagacattacaaaggctgggcaggcccagcgcttatcaaattatttatactgctcacagtgctataaattacaaggaatattatgaacaattaatattatataattcatttgtataaatatgactaaaaagtagcaatactctcccatttgctttacccatccaatttaaactgtacatatttgagagaaagggagaaactagtaaaaagacttagtaaagaggagttactctacagtcatattaaatgttagaccccacttaacgctcaattccttggaagctttaatgtttcctagtttttttgttttgttttgtttttgagacagagttttgctcttgttgcccaggctggagtgcgatggcacgatctcagctcactgcaacctctgcctcccaggttcaaacaactctcctgcctcagcctcccaagtagctgggactacaggcatgcgccaccatgcccggctaatttttgtattttaggagagacgggtttcaccatgttggccaggctggtcttgaactcctgacctcaggtgatccaccggcctcggtctcccaaaatgctgggattacaggcatgagccaccacacctggcctgtttcttagttttaaaagggatgaatagcaagaaatgatatggtgacaattattcttggcatgggtttgagaagaaatgatattataagaattcttcttggcatgggtttgagaagaaccaggtatttattaaaagaagagattctcccaataattatcttagcatagaagccaatcttctatttcaggattactaaacaaacatcttggcagttatttgagcaggattcagcatgaaagagtgtgtttacatggaagatttagacctaaaattgtagggaaaaaagccgggaagattaacaagtcagaaatggccgttattattagagatggcaggtctaaagatactttagccctaactgtggcaccagcatattgaataagaattcattcttattctcaaagacctagctgcaaatggcactgccctgaaggtttcccttcttacctttcaggatatccctaccatgtcaggtaagagagcactttcagaaagattcacaagaatgccatgtatgtgccccagacctttttctccttggtttctacagtgaaattaagtggacttacattaaataagttcacgtattgagtgaggcacaggacagtgctgacgatgtaataagtgcacaaacatatttgtttaatctaaatctttgatcagaaattatgtaacataccctatataattttttaattataaatctgagattccaacagaaatatttacagattaattttcctagactagtataaggttcataattgctaaagtttaaaacaaagcaaatattcaggaataagaaaatgtattagagtgattacaattattacaattaaactagtttttacttgcccattctaaagtaatcaatgcaagtatttaataagtaaaagaagaggttatataagcttttatatatatactttatataagaaattggtaaccatggttgtgcctctggagagggactgggagtttcatcttaatacttattcttctcatgtgcatgcacattttcagaaaaactaaaacactatgtataatactagttgatactggtaaatgtttaacccatccaagtagtgatcatttcaactttagcaggtatttccctcaggcaatatctgcttggcaattcagctggtatctgcagtctgggtaccaaatcagttattctgttcagtgggtgcctgccaactcacaggaacatgctgccccatccaaatccattcctctgcccaaaatagggagggaatccctgggaatatcacacaaattggcctgaatctactcaggattccagctttcgggacactgcagggattactcagctcctcctactccaagcctgaggattccaaccagtatagcgaggagcattttcttttttaatatttttgtcccaatcattttaaccatggcaagagccagctataaggattgcctcttgtagcaggagggtgctggggtatttctcacaacatctccctaaggcagggtgcttttatcccggttacacagagccacatccttgctttacaaccctccctccctcctgcccttcggtcttctttcaatcagatctcccttctccatagggaaatgtatcaccaagtaagatcgacatgttctttggtggggatgctgcttcttattaaagggaataattaaacggccctgtattttactcctctctaaattccttttgtgtttcaaacaggaggttgtgtttcacttcctcactgacacagttataggatactctttctggaagaaagaataaaagctcacctataagacctctgtacttctggtccccacagacaaagatggaaaggcaattgatcggattctgaatcaggtatcagtgcaaaagcaagagttcaaaaatccaggtgagtggcccaggtcttagatggcagaaaaccccgaataataaagcaggtggtcacatcaacaggacactgacttctaatgggagaaggtggagttttgtgtgggcccagaaaccacacaactaataacaaccttcagcctgcaggacagcccctgaacacagccccttcccccttgcagttcctcacaggaactcagactctctggctgcccctaccttgtctatcagtccaatgctagcaacttgatggggtttgcactgtaactgcaaccatagcagagtgctcattttagattcatgtcttgcaaaatatttcgataacattctagcacccacatactcattgtggaaaaaaaaagcaagaaatagtatgggctttacacagaaccaaaagcagcaggcccctgtgtgcttgtgaaccaaacgcaaccaaatgtttctatttgtgagccaagatgactggggaatttcaaatatttctgtatttcataattacaaaagaggcatgctttcagaattaaatgaacacagtttttaaaaaatttataaagcttgtgataaaaatgcttcattttatatgcttattcagagtctgcttttaattatttcttacaaatgttttcagtagatatcttatagtttggctttgttccctggaatctgagaggtgaaactggctaacaaaaataaattagactgactagtccaattccattgcctaaattgaaacaaattttgagatttagagaaaagccaaaaagagtttgaaaaaaattgcattataaaagtcaatttctaatgttctaaattcttattctgaaaaacaaggcaataacatttacataacataaatatatatgtggccagatatttaggcattaaaaacaagactggcactgacttatggaattctttgtgttttgatgtgacaaggacaaaaggcttcttttgctaaaaataacaacatccctacttaagaaaccatctgaatgacattcttgaaactatgtctttactgaaaatcagggctgtggccatggtatccaatcagctagtccacaataggtacatttctttttttaattattattattttttttggttggggaaagtaactttcttagttgttgtgctttgcttttgaatactgagtgttgtcatatgaaggagccatttcatatgagatattttccagtatagaattagacagacatttttacataattctacttccatataaagttgcactttttttttttgctatcaactcagtaacttaatatgtgtgtgtcagtgcacgtatgtgtatgtttagtcaccagcaaaagagttagcttttctggacctaagttcttttatctgaaaatgttatatatgatattcaaagctcttcccttctaatatgagtacatgaatgggagtggctgttggtagtatagagaaaaggaatataacatgtatatttttacacatatttttcataataattataattatgtaaaggttaaggaaagtcatattttaattgcatatttatttctaataaattagaaagcagataaaaggacatgaggtagcagacttcaaatgctataacgtattttctctatctttttttctagtgagattttgctcaagagagtgtgatgctaaattttgttctgaaaatgagtgaattttcattcatattttgagacttagaatttgtcattctaagtttattgtctaagtaactaaatggtgaatgagtacaacataaaaaagaaattgttctatcaattccatacaacattcacagtggaaagcctggagagtttcctgatttatagagataacagagtaaataggcaacttggggaatgcttttttgaagtacatttaaatagacaaattagagcctttggcatttctagcaaacatttatggaggtaaaggataaattattggtaataggctctgatctatcttcttttctcccgatttttgattttgtacattcaaatcattataagtttttagcatacaaatggcaagaaacatgaatataatatacagtttaactgtgatattttataatcatcttgacaaatttcatcattaaactttgatattattagattttacatataggattttatttacatatttctttcatacatttttacactcttgggcaaataatatttcccttggatgtaataatgccattctcttttggcaagagtgtttcttccaaaaggatatattaccaagcatgggaaagaggaacagaatgctttcatggcaagataagttaaatcagcagtgatcccaaatgactctcttactcatttgcatatctatttatgtgttgtcagctacatacacagtattaagaaattcaaaatgtacaaacaccataaaagacagagttttcatcttcaaagaacttatagtgaattgataagcagaattataaacaaaaaccatattatcatcttaatagatacagaaaaagcattggacaaaatccaacatcccttcatgataaaaaccctcagcaaactaggcatcaaaggaatatatcccaaaataataagagtcatctatgaaaaaccccaagccaacatcatgctgaacaggcaaacgctggaaacattccccttaagaatgggaacaagacaaggatgcccattcctaccattcctattcaacatagtaacggaagtcctagtcagagcgatcaggcaaaagaaagaaatgaaggcacccaaataggaaaagaggaagtaaaattatttctctttgctgacgatgtgatcctttacctagacaaacctaatgtctccaccaaaaggctcctagacctgataatgacttcagtaaagtttcaggatacaaaatgaatgtacgaaaatcagtagcatttctatataccagtgacattcaaactgagacctacatcaagaacacaatctcacttaacaatagacacacacacacgcaggtgcacacacacacacacacaaatacctaggactatcaagaaggtgaaagatctctacaaggagaactacaaaacactactgaaataaatgacacatgatagacaacataaacaaatggaaaaacatttcatgctcatagctttgaatgactaatatcactaaaatgtccatactgcccaaagcaatgtacagattcaacagtatttctatgaagttatcaatgttatttttcacagaattagaaaaacctattctaaaatgtaaaatggagccaaaaatagagcagaatagccaaagcaatcctaaagaaaaagaacaaagccagaggcatcacctgacttcaaattatactgcaaaactacagtaaccaaaacagaatgatactggtacaaaaatagacacatagaccaatgaaacagaatagagaaccccaaaataaagctgcacgcctacagccatctgatctttgacaatgtcaacaaaaataagcaggggggaagggactccttattcaataaacagtgctgagaaaactggctaaccacatgcagaagaatgaaactggacccctacctcttaactcaggatggattaaagacttaaatgggagacctcaaactataaaaatcctagaataaaacctagaaaatactcttctggacactggcctaggcaaagattttatgactaagtccccaaaagcaattgcatacaaaaacaaaaattgaaaattaggatctaattaaactgaagagcttctgaacagcaaaagaaactatcaaccaagtaaacagacaacctacagaatgggagaaaatatttgcaaactatgcattcaacaaaagcctaatatccagaatccataagaaacttatacaaatcaataagaaaaaaaccaaataaccccattaaaatgtgggaaaaggtcatgaacagacacttttcaaaagaagacatacaagcaaccaataaacatgaaaatatactcaatatcactaatcatcagagaaatgcaaatcaaaaccacaaggagataccatctcacaccagtcagaatggctactatattgaaaagtaaaaaaataacggatgttggcgagacggtagagaaaagggaatggttgtacactgtttgcagaaatgaaaattagttcagaccctgtggaaaacagtttggagatttccaaaagaactaaaattagacctaccattttgacccagcaatcccattactgggtataataccaaaggaaaataaaccatcctaccaaagagatgcctgcacttgtatgtatgtttatcacagcactatttacaatagcaaagacatggaagcaacctaggtgcccatcaacggtggattggataaagaaaatatggtacatatacactgtggaatactacacagccacaagaaaaaacaaaatcacatcctttgaagcaacatggatgcagccataagccattgaatgaatgaatgaatgaatgcagaaacagcaaaccaaatgttgcatgttttcacttataagtggaagctaaaatttgcatacacacatacataacgatgggaacagtgacacaaggaactcaaaaagaggggagggagagaggaggcaagggctgaaaaacttccaattgggtactatgttcattatcttagtgacaagatcaatagaaactcgaacctcagcatcatgcaatatatccatgtaacaaacctgcacatgtaccacctgaatctaaaataaaaaatttaaaaaattaaaaaaatatttatatgtgaattgaaaagagaagataaattatagttagggaatatttaaattgcagtgctctaagtacctacctcagcatctggcactataggctctcaatgcattccttcaacaaatatttatttagcacttactacattccaggctctggtctatgtgctggagacacatcagtgagcataacagaaaaattgtaacttctgtagtgagttgaactgtggtccacaaaagataagttcacccggaataagaatgtaaacttacttgtaaaaaggatctttgcagatgtaattaaggtaaagattttgagataagatcaccatgtattagggtgagctacaagtccaatgatttatgatttcctcaagaaattatgtttaagatcagaaaaagagaagacacagagacccagattaaaaaaaaaaaaaaggccacgagaggacacaggcagagattgaacctcatgaagccccatgccaaggagtgccaagggttggaagcagccactggcggctatgaaaggcatgcaagcaatcatcccccagagcctccagagggaaccagccctacagcaccttgattttgaactgtattctgagatgcagaattctctctgcaactcagagagaataaatttctgctgtttcgagccacccatttgtggtcatttatatggcagcctcaggaaaggaacacatctgcctttacaaagcttaaattctagtgtggagagataaacaataaataaataaataagcaaaatatgtagtgtgttagatggtgataattgctatggatataaatactacagaaaaggggcataaagaaaaataaatagtataggtgtgatatgggtgtgtatgtgtattgttagtggaaagtgctgtagggaaaggggagaatcagagatgggtttatggtgaagatgataaaagccaaagctgcagggctctctgcttgcataagtacctgccgaggctctggggcggtgccctggcaagtgtgtttatttagccagatgctttggcaaaatttgcaaaagtaaaattaaaattatcccaatatcaagaagtgagttagaaagatgttttgaatgtttaaacaagtgaaaaattactgactcctgatttcaatatacgtgaaggatgcttttttatccttaatttttttagattaaaggactaaaaatataaatgaataagaaaatttcaaatacaattattggagtatgaagaaaatgcagtaaagccaagtggttaaatcaatagaaattattcagatatcagacagtacattgtaacaatttttttccagatcatctcaaaagtggtaattcaataagagaaagagataaatttcaaatagatatgatgaattggcccttgggttgcttgacaagtaaattaatgaaaaggagttaatcaaactaacacacattgaaacaatttttaatttttttctgatttgatataaaatgttgacattgacagagaggatctaaatctcatgacaaatgcagtgacacttcgatgacaaactggtaaaagaatacaagtatgtaagattagtcaacatacacacccacaaacacacacaccacatcgaatgccctgaaatcttacgctcctacatgaaaaaaaaatttaaatatttctcaaaatttgataacaatgttaagaatgtatatgacattacaaaacttttctaactattaataattttttaaaaatcaacaatcctgaagaaaagtttaaagtatcttcccaatctctacatagaaaatattacaatttcagtgtcatttaaagagacaatcaaagaatatttagccaagcataggggaaaatgtattataaaattgggttgggcagttaataaaatgttatgatttataatattttgtggtagttgggatatatgttaacttaaaatttgaattcatagtgatatcttttctccttttaactattcactttgtattgggcttgtattatattagtaattgttatttttgctcttaaagggaattccatatctgaaccagcttcgggcccaggttccagctgctctgtccccacagaaatgcaccagctctgtaagagaaactaaaagactggagaggagaacgtgaacacagtcaggctgtggagatccaaagaagtcacagtgttatagaaagggacacaatcccaatgacagagcaaaagcatctagggatgatggagagggtcttgacttacaggttgctgaggctcaacgtttcctctctaccttgcttttgttgatagcatattgtcagtggaagatctctctatattccactctggacctgaaggttatgctctcattctgtgtcctcaacaaaaatctcagaggggtggaagtcagatttgatttcccttttctttcagtaacattttgattaattcccccaaagcttcattccacagacttggagattttgacctgaactgttctccaggtctgaaagcatgactgaataaccactgtcacctaacatctgtatgtgctcgcccatgcacaaaacactcacactccctggtctgctctcctggcagtctattgaagggaatttttactagaacacagtggcatcaagacacaccaaaatcaggaaaacagcagaacataaaaacgggctggcttctgaagcactaagttaaccttagtaatcaagaagacaagcctcccccaagtacagcaagatctattgtgaaaatacgtgcctaaaattttcctatttagcttttcacattactctttccattagtaaagtctattccatagttatacagagtttttgtctaacttaatgtgggattttattagaaaatataacaccctcttctcactgttcaggtgagaaacacagccctattcagagtgggatggcttgtttcctgccttgagttttcagctcaaaaatgcctctaagatcccaaccctcctagactgatgaagggatggaactcctaagaccagctcttgttcttttacttctacagtcatttcttaacttcatctaatagtaattcttttgacaggatctgcaagttctatgatttttgcaagcagatttttataagcagagttatctagcaatatgtggaagggaaacacattgcaggctactcacagagtctgtgttatacccatatttggaacagatgcagatataaaatgcacttggttccatgagagaagcttcaaaagaggaaaggccaatgtaatgggcctagaacatgacaactgaagtgtccattgacatcatgtcaaacaacaatctgcctgctatgttctgacccattctcttcttaagattttgacctttactttggtctcattatgagaatgaaaagttcaatttttttaaataaaattaaccaatatatttataggatttaaaaaaatcagaagcaaccagcgtttggcttcagctggactaatctaatggcaagtatcccttccgcaccatatgatttttgttgatctgcttcttcactgctaggcagttgtgaagtttggctctcttctttaacaatacccagcttcttcactcagtgttctaaaccaggatctcaatccttctcctgagtgtccacatctactcctaggctctcttctctactcagtctttacataggcaatgtcttctatacccaaacataagtgaggtaagtctatctactctgcctctaaatatctctcaaaatctgatcatttctcttctccccactccctctactctagaccatgatgccttcatttcccacctgaattactgcagtagcttcctgattggtctctccacagaaactcttgttgcactctcctatccaatctctatcagtagccacagtcatctttttttaaaaaggcaaatttgatttaaccccattcttaattggtttagcattaccatattcttagtcttgctgacgtctgtatcctgtgtacctcgtcagcctcatctggctccatggtattgcttaatttacagttagattatgtttttcttctctcaattctttgattataccatgctctattttgcttcaaggcctttgcacatactaagaaaaattaaagttttaaaaaaagaacttctacaattttcaaccaccacgactacccaatgacctgcatctgtgcccatatactctacgttctcttattttactatggataaactgtccttgatccaaaaccaagactagtcccttctgttgtacactggatcaatccctttttatctgctcaaagacattatcccagcaatttcctgcaacatcaatttttccctctccactgaattgtccccctcagcatacaaccatgctgttaattcctcaacttaaaaaaaacaatcttggctcacattgtccttcacctatatctcatcactcccctttcctctgcagagaaactctagcagcatggttggcttcctcaagtcctctaatcctttattcaaagttacattctcagtgagatcttccatggttaccctaaaactctaacctcttgatccatgagagcagggatatttgtcaacattatatgctatgtgactccaatgcatatctccattaaggaaggcactatgcctctttttgctcactgctgtatcttgagtacctggcattatccctgtttcagagagggcgcacaatcactctggtgaatgaaggaaccaatgcacgagcattataaccacttcacctctccttggccccctccctgccacaagaagcagatagttatggtattttaatactttacaagcttaaatatcctggtaatttgtgcagtcagtaacttcttactaaagttactaagtctaaatcaaggcttggcaaagtttttctgtaaagcaccagatattaaacattgttgactctgcaggccgaatggtctccatctccactactctactctgcagtagtagtgcaagctccaagaaaccttcatttataaaacaagtggcaggcagcatttggcccacaggctgtagtgtgacaacccttagtctaacttgtttttatggatgttaactcatcttctaaacaggagcacatgaaaatgataacagcattgttcccatccaggtagcaaggtcagccctttccattgcctcacaggcccttggagccctcacaagtgaggatctcatctgttacccccacctctcaactcaatctctggttcgctactagtttacaacataaagttagtttacaaaggcaattatcgccaacagtaaagattaaagaacagtaaaataacatctctctacttgaggatatcacatgaattttatatccaatatacttcaaatcctattatgcttcattgtctcatgacccctccaaggaaagtatattagagcttttcttcgtctagagccttaatagaaagacaaactccaggagggaggggaaaatgtagattcttataatcctttcagaggcatttacaaaaacctatatttttacattttgtagatgacatatttctctctcaggtgtataggcctatgtcattcaaaacaatcttccatttgcttgtgcatacaaaatgctgcaacataataatttaaatgcaaataagaagccacccatagacaactttattttgtggttgtgatctgaggctaatcgaagtagtcattttccagatgaaaaatgtcttttaaataagagaaatggtacagatgtttcaactgatgccaattttatttttgcaaatgtcatctgagtttggttttctcatcaattaacagactctaatatagcattgtacaaagtcaattttctaaaaatcattttcaaactgttaaagcaataatctgtggcagtttaataacagagcttagtgttatgtgacaatacatattattttgaatggacaagggttttagttaatggtgccaatttacaacaatgaaatctaacttactgtccactgtcaaggcagattttcactgtatttaagatattcctagcagagaacttttatagttgttaaaagtacattatttctttcaggccaacaaatcagaaaccatttagccccaaatatataatttcctaattggtaaattaaactacaggtgtggggaatttttatggcgagctgacctggagttttctcagaatctcaaatgccccaggaatcatagtcaccttcattttcttttcataccacgtaagggttactttggcataatcggagtcagcttatgtcactctcagataattattgatgtcagcagggccttcttcagaaagagggaagtaacttcagtcagaaattgcaaaacattcaaatattttagaaagaaaattaaagattagatgccaagatggccaactagatagcttctgcacagcaaagaaactaacagagtaaacagaagacctgcaaaatggaagaatatatttgcaaactatgcatatgacaatggcctaattttcactatctacagggaacttaaacaaatcaataagcaaaaaacacataaccccattaaaaagtgggcaaagggcttcatgaacagaagacatacaagtggccaagaaatatatgaaaaatgcttacgtcactaatcatcagagaaatgcaaatcaaaaccacaataagataccatctcacaccagtcaggatggctattataaaaaagtcaaaaaatgacagatactggcgaggctgaaaagggaatgcttatacaccattggtgggaatgtaaattagtccagttattttggaaagcagtctggagatttctcaaagaacttaaaacagaattaccatttgacccagcaatcccattaccaggtatatacttccacaaaaataaataattctactaaaaagacacatgcactcatatgctcatcactgcactattcacaatagcaaagatgtggaatcaacccaggtgcccatcaatagtagattgcataaagaaaatgtggtacatatatactatagaatactatgcaaccccaaaacagaataaaatcatgtcttttgcagcaacatgaatggagctgggagccatatgcttttttttttttttttttttttttttgagagtgagtttcactcttattgcccaggctggagtgcaatgacccgatctcagctcaccacaacctccacctcctgggttcaagcaattctcctactttagcctcccgagtagctgggattacaggcatgcgccaccacgcctggctaattttgtagttttagtagagacggggtttctccatgttggtcaggctggtttagaactcctgacctcaggtgatccacctgtctcgacctcccaaagtgctgggattacaggtgtgagccactgcgcccggcccactgggtgccatattcttaagcaaattaacacaggaatggaaaaccaaatattgcacattctcacttataagtgagagctaagcattcagcacacgtggacatatgtataaatatgggaacaatagacaccatggactactagagggtagagggagggtgggatgcattaaaaaattacctatcttgtactatgctcactatcagggtaatgggatataccatacctaagcatcatgcaataatcccatgtaacaaatctgtacaaatacccatatatctaaaataaaagttgaaataaaaaaatatataaagctagaaccatataacagccctccatcattagcagttttagaaatttggatagaatacaaaataatagtgaaacctagatttgatattctggcatatctaggttaagataaaataccttaacctagatatttgatcttggttctttctgatactgaggaaattgtttaacttctccaggcttctgttttcttataagtaaaataagataataatggtacctaccgtagcatcatcctgagtatgaaacacaatataacatatccagtgtttagcataaggtctggcacgtgataatgtattattctccattcttcaaatttattattgacaatttgagatggaagataaaagacaaagaagaaagagtactgtgttcatcaaggaagaaaaggcaccccccccccgaaaaaaagagaagcatcttgatataatatgtagtttctttaatatttctattattgatgccagaacctatttgtaaactattttaattgcattttctgttaagccaaccaatttcttctaagctacaggaaatattactgcatgtgcaactaatattctaaagcattcagaaattcaaatatctacccacttctcttcacaagtccaccattcacattagaacaaggcattaatttatttgaaatgattcacatctcacaaagaatggcttttgtagatcctttctattttacaaaggaagactatctgaagaatagatattttattaggaggaaagatgggagaagaaaacaaatttggaagaatggaattataattgaggtaaaaagctgtgaatataattgaatagaatatattaaggttgaaagaagatgcctggagggaaaggagtactctcaagggtttctgagaatgttgtgttcacctgctaatgtctcacctgccaggtcttgaccctgatgataaggtttggggaatgacttgtctctgaaatacttcttgacatggtttggctgtgtccccacccatatctcatcttttgaattgtagttctcataatccccatgtgtcacaggagagacctggtagaaggtaattgaaccatggggacagttacctccatactgttctcgtgatagtgagttctcatgagagctgatggttttatagaggcttttccccactttgctctgcagttctccttgctgccaccacgtgaagaagggtttgcttccccttctgccatgattgtaagtttcctgaggcctccccagccatgctgaactgtgagtcaattaaacctctttcttttgtaaattaccccgtctagggcagttctttatagcagtgtgagaacggacaaatacacttctcaagtacttcacacatgtatgcacactcctgtgactgcatgcacactacaacaaagacagtaacttctggagaacaaggacacctgtaacaaaagttaaatgcaacttttttcatctttttcctcacgattgtcttcaaaatgtttgtatcaggaacaacgctgataaatttagcactaggtgtgagggagagttagacaaagatatgttccagtattaaaagagaagctttctcagtggactaacagcagagttaattttccttcagggacaacttttgattaaagacttaaacgttagacctaaaaccataaaaaccctagaagaaaacctaggcaataccattcaggacacaggcatgggcaaggacttcatgtctaaaacaccaaaagcaatggcaacaaaagccaaaattgacaaatgggatctaattaaactaaagagcttctgtacagcaaaagaaactatcatcagagtgaacaggcaacctacaaaatgggagaaaattttcgcaacctactcatctgacaaagggctaatatccagaatctacaatgaacttaaacaaatttacaagaaaaaaacaaacaaccccatcaaaaagtggtgaaggacatgaacagacacttctcaaaagaagacatttgtgcagccaaaaaacacatgaaaaaatgctcaccatcactggccatcagagaaatgcaaatcaaaaccacaatgagataccatctcacaccagttagaatggtgatcattaaaaagtcaggaagcaacaggtgctggagaggatgtggagaaataggaacacttttacactgttggtgggactgtaaactagttcaaccattgtggaagtcagtgtggcgattcctcagggatctagaactagaaataccatttgacccagccatcccattactgggtatatacccaaaggactataaatcatgctgctataaagacacatgcacacgtatgtttattgtggcactattcacaatagcaaagacttggaaccaacccaaatgtccaacaatgatagactggattaagaaaatgtggcacatatacaccatggaatactatgtggccataaaaaatgatgaggtcatgtcctttgtagggacatggatgaaattggaaatcatcattctcagtaaactatcgcaagaacaaaaaaccaaacaccgcatattctcacttataggtgggaattgaacaatgagatcacatggacacaggaaggggaacatcacactctggggactgttgtggggtggggggaggggggagggatagctttgggagatatacctaatgctagatgacgagttagtgggtgcagcgcaccagcatggcacatgtatacatacgtaactaacctgcacaatgtacacatgtaccctaaaacttaaagtataataataaaaaataaataaataaataaaaaagagagagagacaaagagagggaaacagagaggaagagacagagagagaaattaaaacaaaatagcacttatataggaagaatattctccagagggaagagacatgcagtttataatgtcatgcacttaattaattgtagtgcaaaccactctcattaggagtccattgtaagcctaccagcttcaacagtcaaaagggaataattgcaatgaagcccagtccttgtctccttattgagagctttaaaaactttgccacggacatctcaagagactcttctcttcactaccctccttttgttatctttttatgtaaaaaaataatgcattaaaataaaattcaatcttcccctttggtttttccttactaactttactactaattttacacctaaacttctagcaaagtcagggcactttctgtactttagtttctagagtgatcaagggctgtgatttgcaaacaatagaaatgatggattgacataagcaggaaaaggaatccatcaaaagaatataggatagaactcagaataaacagggagcttgaagaagcagacttgagcagaatccagtgaagataataagcagctgggaggctggatcagtctgcctgggaccctattcctcacctgctgggcacacactgctcttcgccacactgtcagcagctacaacagatgccactggcccttccactcgatagtggcatatgtgatggtctgagccatcccctcaagattcaaagtcctggctaggaacatcagattgactacattgaggttatagaccctccctctgtctgccagaggggcatgcagagggaatgcatattcctactcccctagtggaaggctaggtcctttctctcacctattctgaaactcccccaaaacagaagaggattggatactgagtagcccagtatctacccagttgtctaccctaagaccttacctctcttgacttctcatccccccagctatcccaaggactgtgtttcctaaatttccaagcaatataggtgacaataatataagtctaaaaaaataaaataagggacaaaggatccggcttgtcagccaaatgagttgatcaaacctaggtcgctcacaaagaaggtaaaaactgaaaccaaaatacttttctgtcccagtgctaaacaatttggagtcaaagtttaaatgcctgttttaatgctgagcacatggagaccaagcaaaaataacttaggtacttgctccaggaaatgtttgcttttggaaaataaggctgtaaatggcctgaaccagcttattcaataagactaacagttcacttatcaaggttcactttgagaacctcactgctcttagagaccccactaatccagaactgctaggctctaaattctgcctaatgccagccatttttccaccttgcaagatcaggctcccagacctggctataaaactctacaaatatcttccctttacttcccctttccaaaatactactaattttaaaggtgatgtcctcccttatttcactgagatgaatacttagtttcacttggttctgctggtgatcttttttggggagtcggtcaccaacagaggaatggttatacaaagtgatctggagaattctgaaaggcccaagtatccctacctcccaccatagttgccaaaacttcctattggattgcctgtgaaaaacaaaagttcatgaatttttaaaatctacatataaaatattcccagtacctcaaactgtgtctgtcatatactaagacacaatagatgaatttgtatgaatgaaattgtaaataaataataaattttaatgtaattttattgattggataaacacttattttcattaatagaaatcaatgtgagaaaaataaaaaaccacaattttgtaaatcaaaaaattcaaattattttcacattgttttccagttctcagccacatgcaggcatatattttgcagtgttttaactttaacctggatatacttgtatattttgcttttctcctcaaaacattctaaatacttccatgttaccatatacttatcataataatcattttaatgactatatcataatccataagtatacattttcactgtcattcattcagttttgccaactgcaaaggatgctttgacatatagagttttatagaaacactctcatctcagtttttttcagtggatattgaacagaacataccagaatttataagccaaaataagaagatatgagtcttggtctttatttgttgcagataatcctctgaaaatcaattaaccttgacatttcttcttaagacaaatgaaggctcctctgcttgggtctcctccactgagtttaattaaaaccctttgctaaggcactgtgtacatatgatatactctacagttgccaaattctagtcacagatactgtttcaaacagtgtaaattaaacaaacaaacaaaaaaatgacccagacaaggtcaccaaagagaagagaataaaaaaattgtgtgcacatatgtattacatcaaggatcttggttccaggtctcaatcatacaactctatcaaatagccttaaataaaaattagcatgatcataggttgctatgacttaaagtctgcaaataatatgttacatccaagctaagggcaaaaccgtatgcacgtgcctttctgttgtttcactaaggtcacaacagtaaccccgtttacagacgaatgttttctacaaatagaatttttccacattgaattcaattttattctttattttattgctaaaattggcagcatgacgaactggaataatgcttgaatgccagaaatagtatttaagaatatataagaaagcaatagtgtttaattcaattattatttctaagaactaaaattctcaaaagcaaactcaaatgctaattcaaaatacctaagatgttattattgctggcaaaatattagagttagatataaaaattatttaaaataaactaatactttgaaaatgataattcatattttttaaaaaatcagatccttctccatactccagagactgtaataaatctgggaaacagctgagtaatctggaagatgcagaagtactgaaacaccagaagctcctattctccaatagatgctgaaatgtactaggaacccaaggacaccattgcagacctacttactgggactaggacaaacgttatggtctttccaaaagacctactagctatgctcaacttcttgttccctggtttaacacccatcagtcagaggacaggtggaccaattattgaaaatattttggaatgctgtttcataatcatatctcagacaaccacctgatacagagcttcttcctctccctgtgttctttcaacttcttatccccatgttgcactgtgatttctctcccctgtctatcctcccattctcattctttccatattattcaatcagtttctctggatcccttttcccatggcaaacagacttcacttcatcctcagccttgccaccaaaaagtcatcccagatcctaacctctctcaaatttgactcttcgctaaagatgtcacttccctgtggtggattcagggtaaggtactctggttctcaatgccctctctgggtcccaagatgaaatgggtgctctcctggttactcacttttacttactcctccaccttcttgtaaaaacttctcgtttgacatctatgccaatcaactctacttccttgtctctgacttctgccagtccctttggtcagtttctcattcactgaaaactgcccacctttttgtcatcttgacagcttgaatcctgctgcagtcctgggtgactttgatgttgatgtggaggcatcacctcatgccccgatctctcagttcctcagctacatcttttccaaggcagtcaccctcttccctgacacccttctatgtcttgaacataccttaaattacctctagcacttacatcttaaagttcattctgtcctccaaatatgatctatcttttgtttgctcagttattctaattcacctgtttgacatcatagagatttctagagaccttgaatactttctatatcagtatcttcttatattcactcatttccataaccagctaagttgccacaattcatcatttctatcactttctttcaaataccttcaaatcccttgccctatttttcttatattgcacctgctttccaattttggaataatccaactgtttgccttttcagtgtttatatcatagctgcttagcatactggaaaatattacaaaacctcacatattggttacatgaaaagttaatggtaagttttatcaactgtaccttcaattggcattctggtctagccatgttttagcagtttttatttagctaagtgcagacactctactttaatctcatccctggactttgacctgctgttctctcttcctggaaccatcttattttggtctcaggttaggtgttagttcctcacaagccaaagtgagtttgctccccagtgagatttcatatttctccatttgtctgcagtcatatttgtacattatatgaaacaaacaagattatagtggtctattttcttgcacgtgccctacttgattcaatcccctgtgaaagaaaaggctgtgttttgtcttgttgagccttgggtcgccagtgcatacctcagtatacagcaaatatcagactctcactatttgttggttgaatataaagtgaatacattaatatatgactaatgcatgattgaggggatcagtatatttaccagaatcccttgcatgtatgattttattgtttttaattctgttttgtaatatgtgtataaatacaggcatacttgttttattgtgctttgcttgatatggtttgggtatttataccctccaaatctcatgttgagatttgattcccaatgttgatggtgggcctagtgggagatgcttgggtcatggggtcagagccctcataaatggcttggtgccctccctgtggtcatgagttattgtgagatctaattgtttaaagaatatggcacctgccccctctcttattccctctcttgtcatctgacaaagctgctcccccttcaccttctgccatgaataaaagcttcctgaagcctcacaaaagccaagcagatgctggtgccttgcccagacaccctgctaaacaatgagccaaataaatctcttttctttgtaaattagccagtcacacgtattcctttatagccatgcaaaacagactaacacattgctttatcacacttcacaatattgtgcttttaccaattgaatattgtggcaatgctgcatcaagcaagtctattggcaccattttttccaataacatgtactcactttgtgtttctatgtcatattttggtattctcagaatattatgaactttttcattattattatatctgctagggtgatctgtgatcagtggtcttggatgttactattttaatttttggggtgccacaaaccatgcccatgtaagacagtaaacttaatggattaatgttgcatgtattctcactgcttcactgactggccattccccaatttctctcttttcctcaggtctccctattccctgacacacaataatattgaaattaggccaattaataaccttacaatggcctataagtgttcaagtgaaaggaagagttacaggtctctcgcattaagtcaaaagctagacataataaggcttagtgaggaagacatgtcaaaagccaagacaggctgaaagccaggccttttgtaccagttagccaagttgtgaatacaaagaaaaagcttttgaaggaaattaaaagtactactctggtgaacacagaaatgacaagaaagccaaacagccttattgataatgtggagaaaacttcagtggtctggatagaagatcaaaccagccgcaacattcccttaagccaaagcctaatcccaaacaaggccctaactctctttaattcaatgaagtctgagagagttaaggactgcagacgaaaagttggatgccagcagagggtggttcatgatgtttaaagaaaagaagccatctccaatacataaaagtacagggtgcacaagctacccatttaacaaagctgcataaataccctctgaacctaaaataaaagctggaaaaaaaaaggagtgtgaagtgaagcagcaagtgctgatgtataaactgtgacaagttatccagaaagtctaactaagatcaatgatgaaggcactacactaaacaacagattttcagtggagacaaaatagccttctattgggagaagataccatctacaactttcatagctagagaggaaaagtcaatgcctggcttcaaagcttcaaaggaaaatctgactctcctggtaggagctaatgcagatggtaactttaagttgaagacaatgttcatttaatattccaataattctagggcctttgagaattgtgctaaatctactttgcctgtgctttataaataaaaaaataaggactggatgacagtgtatctgtttacagcatggtttactaaatattttgagcccactgttgagacatactgctcagaaaaaaagattcttttcaaaatatgactgttcattgacaatgcacctagtcactcaagagctttgctggagatgcacaaggaggttaatgttatcatgcctgctaccacaacattcattctgaagcccatgttccaaggagtcatttcaacttttaagccttattatttaagaaatacatttcatagggctatcgctatgatagacacttatttctctgatggatcagggcaaagtaagtcgaaaactttctggacaggattcaccattctagatgccattaagaatatttgtgatccataggcataggtcaaaatatcaacattaacaagagtttggaagaaattgattccaaccctcatggatgactctgaggggttcaagtggagaaagtaactgcagatgtgctggaaattgcaagagaactagaattagaaatggaacctgaagttgtaatgaaattactgcaatcttatgataaaacttgaaagaatgaggagttgtttcttggatgaagcaaagaaaatggtttcttgagacagaatctacttctggtaaagatgctgtgaacattgttgaaatggcaacaaaggatttaaaatattatataaacttagtagataaaccagcagcagcgtttaagaggattgactccaattttgaaagaagttctactatgggtaaaatgctgtcaaacaccattgcatgctacagagaaattgttcatgaaaggaggaatcaatggatgtggcaattttcactgtagtgttattctaagaaattgtcacagccaccccaatcttcagcaaccaccaccttgatcagtcagcagtcatgaacattgaggcaagactctccaccagcaaaatgtttctgacttgctgaaggctctaatggttgttagcatttttttttttagcaattaagtatttcttacttaaggcatgtacattgttttcttagagacaatgctattacacactacaatatagtgtaaacataagttttatatgcactggaaagccaaaaagtatgtgtgacttgctttattgtgatatttgctttattgcagtggcctggatctgaacccacaatatctccgaggtatgtctggtatataccttcaagaaataaagttagtctgaattaaataatgttggagaaataagaaagccaaaatcacatgttaactgagacacagaagagttagtagaggagtaaagagggagaccacccttgaaatatgtgatcaaaagctgggaaagttctagaaagtgaatggtaaagaagtatagtatttatgtattataaactttatattctaaatattatttatatattataaattacatatttaaaaaacaagtattctaaagtttttaatatctatatctagctttcacacagcaaggggtgtgtgtgtgtgtgtgtgtgtttatgataacatttagcactaatcacaactgtttaggaattacgtcatggtaaaattcagaaccccctgagaaaaagccctcctgggaatgtggacaaaggtctcactttaacgaagctcagagccacgaacttcagtgtaaatgatgctaatctattaaacaaagttgacccatcatccagatatgttgcatacatgacttcaaacaacataactaaatagcatttatttttgttgaattcctcagatttgaaataatctaaaagtgcccggctccatctacttcctttcaactggagggcagattctaaatgaatgagagaaatgggatgaaaaataatatggaaattctaagttctagaaagaattctaagtacctagaatttttttttggttggggggaagtgtgtttaacccaagaagtgatatattttttctatagtttttttctatatacagattttttaaaagaaaacttttgccattttgtagtgctcatttgtagagaaaaaaagtttgattacttcatcctttaatgaatttcaactgaaaatatatttttcattttggatttctccaagcaatgcactctggtcatgttaagtttgaatcagtattatacattatgcaatacataataattaaacaaatacaatttggtcagaatatttttacctgcatttttttcataaacacaaatactgtaaaacagaataaaaaggcttttaaagaattataagctctccttaaacacttcagtgattcacagttctgcattacagaaggatggtcagccagggcagtgtttgttgcaaagaaactatctatggagtggaacaattattattgagtgatggaaataatcaaaggaaagggctttgttgagttctgccttgtgcttaatatagtattgtgccctagcacttttcacggtaaaataaatgcttccttgggtttgccttaaaaaatatgggattccccaaccaatctctattactaaaacaagtcatattggcacaagaaagttttgaaaatagggactagatgctctgatgttggtgaacgcagaagttgtcaccctctttagtgtttttaacaacgtgggagcctggtgaaatagaagcctttgatttctaaaggtaaaccttcccctggtacatgctgctttactgacacacagatataaagtaaaatactgtggtatagtatcagtccattcagcatatccttaatggggacaccagaatgtactacaataatgaaaaggtactgtgataacctgaaaaagacactggagtttaatcatgatcatattattttgtaaattgaaggcatggcagatatagcataaaccttttagagagtctatgataggtgagaaaaaagtcagcatttttacattgcttattttagattagattcaagaattgccctgattctggaaataagatgatttttatccagatattttaaagtgctccatcactcttagaatctaattttaatcttgaaaatcacaaatttggggccaggcatgatggctcacgcctgtagtcccagcactttgggaggctgaggcaggaagatttcataaggccaggagtttgagaacagcctggccaacatggcaaaaccccatttctactaaaaatacaaaaattagcctggtgtggtgggacatgcctgtcgtctcagctacttgggaggctgaggcaggagaatcgcttgaacctggggggcggaggttgcagtgagccgagatcacgccatttcactccagcctgggtgacacagcaagactccgtttcaaaaacaaaacaaaacaaaacaaaacaaaaataatcacaaatttacaaagtttaaggcaaagacagataagattaaatcagaacaatgctttaaaataaaaggcttgtgatattttgtgagtatcctgagaagtttagataaacactacaatcataaattgcatgtaaatcaatcaaaaccaaaagaatccaattttgtctgcttagtatgcatcttcaagattattggaagtattgtttcccaatttttggcattgattacttttaaaatttcatctagctcaagaatactatatttctacagaatgtttcacaatcatgattatgtgttttattttcaattttgggaagctttgcctagtgggttatagatcttccatataacattcaataagaacttagataaatcacttaaagcttgaacatacatcaaacatgaaggtacaggcttcatggtagactgtgaaatacaatctctagctttataaacacccttatatccaaattatttaaaatatgaaatgcccattaataccttcttaagtttaaaaggccaaatttgaaagatcagatgtgtctgatccagccttctgtttttccttttttattttctgtttggattttgattcaggaataaattgctgaaaacaatcttttttttaatgttctctctaacgtactgtttgtactcaagagcacaagatgaagagtggttagtcaaagaatccaatgtctaactggcatctgtgaccagtccctctgtgaatagcacacaaatcaaggaaatatttctggaagatccttgtaaaatgaacccttatatgaataaagtaattcttctctctctgttgggtagttaaatttatccccaaaagtgaccatgtcttcttttacattcttttcattttctttttttataggacatagtgatacgaaggtacacagtgtacttcttcagacaggtaataggatactagggatgagaaagtgtttgtaacattctccacccacccatatccctgaatatacatctatccagaggtgtgtcatcatgtcacaagggaataagttgctcttggctctcattttattatagcagatgcagcaatgaaatgtaagtagagagttttattgctacctcccccacattttcttcattcccataacttcccacctgtgaactgggaatgatttccacatgtgtggcaagctagactctccttagattgtctaggggcacatggaccacatgtgggaatgtaagtcagtgcccaagatagggctgaaaggagatcctaattcctcctaaggattctaagcaggaaactatttagaagtcagcaaggttgtggaagaagtgaagcagaagtagggagaccaccattctcattccaaacataactgaacagcacttgaaagcaagacatgtgtgcgggaagatgccagatacagacttctgaacagaaatgtcacaagtccataataactgtaactttctgaaacaggagccaatttctgattgactcccaaatctgctagaacatccatctctaccccaagagttatttgtagagtatctctgaagccaattccaataagtaaacaaatattaacaacaacaaacattatttgttctaatattttcccagcataggagttgcagtttttgatgttatatattaagtattcacaatatgtgaaaaatggggataggtagtataccattagaacaaacccatgaagtaggtgctcgcattattcctacttttgcttttttaaaattaggaacttggagtggttaagtaccttcacaagatggtagtaggtgggagacaggactcaaattcagaccatctatgtccagagccccactcttgtctactcactacccggccatcagccaccataagcatgctgttgcttcattctcaactcttctctgcctgccctcttagtgcttggatgtcttatttgccaccatccaatattcaagggaccagctgtccttgtctccaagtgaaattgctctgcaggttaaatgtcattcttgttttccccttattaaggtgggtccacttcttgccttacagtttcctctccctgctgcacacttccctcatatttcacaggtccctaggattaccaacatattcaaagtaaacataaagtaaaaattcaagacactgtttagaacaaaatattcactttataatacacatgtctaacaaaatactcatgtctagaatatacaaagagccctcagaaatcaataagtaaaataaaaactgaacaaatgtctgaatggtcataacacaaagaagatatccaaatgttcaataaacacatcaaaaggtaagcaatattcctactcatcggggaaatgtaaattaaaaccacagtagtataccactacacattcaccagaatgaccaaaatgaaaaagactgaaaatactaagtgttggtgagaatgtagaacaactgtacctactacgtattgctggtgggagggtaaaagagtacaacactttagaaaactgttgggcagtaatgaaaataaatatttgcctccttatgactcagaaatgctactcctgggaatatacccaaaagaaatgagtgcatatattcacaaaaagactggtataagtgtacatagcagcttcattcataatcccctcaaactagaaacaacccaaaggttcattagtaagagagtaaaaataaatacattatgctatatttatgcaataaaaacaagctgctgagatatacacaaacatggatatcaaaaaaaaattttgactaatagaagccagacacaacaagtacatacagtacaattccatttatgtgaagtccaagaggaggcaaaataacctttagtgatcagttgagaaataggatggtgattacatgacagtataaatacatattaattcaagatgtataatgcatgtaaattataccttaataaaaagattttatgaaaggtaatagaaaattatttaggaggaaaatatgaaaaactgactttccaaattacttctatgccacgttcataacatttcaagtcattaatagctgtctctcttacttcgaggaaggtcagtaaacagccatgaagcctgaattcgcctaccctgtacagaaagttaactggcagatgaattcagggttataggcatcccaggtcttaataattctgttttctgttcatttacagtttcttaagtttgctaaatcacagcatacacacaacctaacagtttgggcatactcaaaagaaattgttaaaaagtgtacatttgaacacattcgcattgcttgggaaaaaaagtcaaagtagaaatatggaagtgtgaataactaaaagtccttttgaactcagtctcttgacccaagtacttcatgaggaagctaatagctgtcatctacgacacttatttctgcacatcaaagttctttttcagaaactaatgattctcagggccatactgtggctttctaaaggggtggtacaagtctctagacccactgcctgacacttgacaaagaaagtatctggcatactgatatgccagaagaaagagcaaaaggctatgatgttaagaaagaaaggaaaataaatctggagggcatgaaaagtcgccttgaccatcaaagatttgcaattgctaaggtatggtctcagtataggttggcaatgggacttaaaggcatactaacctttaataatgaggcaatgggctggagacaactcagttaaaataggctaaatttcccattagctctttctgacagctgtaaaggaatctggggctcctggttaactaaaatggctacagaatataagcccgaacttcacctttcgttttttgttttttgttttttgttttttattttgagacagagtctcactctgtcgcccaggctggagtgcagtggcgtaatctcggctcactgcaacctctgcctcccgggttcacgccatcctcttgcctcagcctcctgagtagctgggactgcaggcacacactgccaagcccggctaatttttttttgtatttttcgtacagactgggtttcaccgtgttagccaggatggtcttgatctcctcaccttgtgatctgcccgcctcagcctcccaaagtgctgggattacaggcgtgagccactgcacctggccccgcactttaccttctacttctcctccaaagcttcgacattccagaaagttatactcctgaattttctagtcctcaatattcaattcgcaaattgttctggcttccaaatgtaataacaatacctttaatatctacttagtttggttcttgttgattggccattattgtctattgtttcttttgaaatgaaacccttgttccatctttcaaaaagaaaaattattttcttcataatattggataaatttgtaaatagtaagcatgacattgcttacatagtcattccttggtatatgtaggggattggtttcgggtctaccacatgtaccaaaattcatgcatactcaattcttgcaattggccctgtggaacccacatatatgaaaagtcagcccatctgtatacatgagtttcacatcccaggaatactatattttccatttgtgtttggttgaaaagaatcctcatataaaggaacctgtgcagttcaaacctgtattgttcaagggtcaattgtacttgattcttaaatcttaatgaagatggaaatgaatgtgaatcaacagaaatgctgggacatagacaattcggaaccctgaagttccttggcacttggaaactgtttttagcaatacattctctctctgacacccaggccagggtgcagtggcaggatcttgactcactgcaacctctgccttcaagcaggctgaagcgatcctcctgcatcagcctgctgagtagctgggaccacaggcgcatgccactacacccagttatttatttgtgtttttgatagagacaaggtcttgccatgttgcccaggcttgcctcaaattcatgaggtcaatcaatccctgcctcggcctcccaaagtgctgggattacaggcatgagccactgcgcccagctcaagattttagattacacacaatatccaactacatagagatatattaggtatattgcatcattttattttaagggcacatgatataacaccaactcaaaatgagaaatcatggttagcaaccaaaatttttgagataccaaagctaattgaatatatcagggctttaaattagtgcattttaattttaattataatctcttcttccacaagtgtgaagaaagtaagataactattctaagataacctggtgtgtagtaaacagttaatcaggactgtgtcaattaaatataggaagacctgtttgaaacattggcctttagcagacctgactttcaggagtgatccaccattctctaaatggtaagactggctcaatttgcctaaactgtctgtgcaaataatgtggtttatgctgcatatccactttccttctggaaatctggaagtttgtatatcctaggcagagggtacctaagtgactggcctccagtaaaaactctaggtactgagtctttaataggcttccctggtaaaggcatccctggtgaacacatttcacaagtgttgtctcaactcattactggaggaattaagtgtatcttgtcttacttcacttggggactcttggaagcttatgtttggtttcctccagattttgttccatctacctttccctttgcttattttgcattgaatccttttgctataacacatcagagccatgaatatgactatttgctgaattatgagagctctgctagcaaatcattgaacccgagggtgatcttgggatccctggatacacctgatatctgtgaatctcttctacacagaatgaacggcagcaatgttatttccaaagaaaggagaaatagtttcaggggaacagcatttttcaaaaaatgttcaggtcaagctgtcatataaaattcccatctgctttagtatgagtctgatcaatgtgtgtgcattcttctttaaacacatagttcaattacaacaacagaaacaaaatatatttcctcttttcattgcttcaaggtgaatatttgttttcttattatttatctagtagtattttcctcatacctttttctaacacaggtcccttagactggtcaataacaagtaaaacagctaaattcagtatctttgagttgagttactagccaaatttcctctgagcacaaccttcctaactttaacaagatccaaaagacattttccccagagatgcctttaacttggcagagaatgtgggaccatcacatttgtagcatagtaattgttttgttcttgtagttttagcaaatgttcaagagtctatctatgtatggcccactggcttcatcctctttcctttctatccaggcttcttaaaaatgcagctggtcacaagaacaaataattgatgtgcccaatatccttactttctttcacaatttttaaactggtgacattgctttaaagtgtaaaactccattggtaaacaacacgaaaaagaataaaaacaaaaattataccctgcaaagtaggaaataaaaatgttacatgatggagacgtggctgtggctgactcctctataagtactaatgctaaataaaatcaccttatactgggagctgaaatagtattctggtaagcaatacctcaaaatgtcaaaggcaaaatttttagactcatgaataccattgcatatttcttttgattctaattacaatacaatttattcttgattccaaattcattttgcatcagtgaacatttcctattgtttctagacatgtatcactacatggtaatttgtccattagttctcatttgttaaaatgtcttctatcaagtcacatatggccaatattaattttccaagtacaactgccctttggcaaatgtttattagcattcaccaatacattttcagctcttccatgtaaaacaatttcactaaaatgtcttctcctgcagatatagaaatgtcacctgagaaattcatccttttttttttgactctagaaaccccattgttctcccactcaaatcaagcaatgagccacaaaaactcaaaagaccacagacaacaatcaccatctaaaatataaaatggggaaatgacatctgagggcactcacccactggattctgcagaagtgatagcaatcagcggcagaatcttcagggggaggctggttggtcgttgaatgttctctgattcacttttcaagtcagcttgttccaactgtctgaaggcgagagggggaagctgaatattgcgacatgaaagtctccggacaagatagggttccattccgcggaaagggtcttcctcttcattactggaatgtagtgtttcctcagaggcctgaggtaataattcaagaaagtacatataatcaacaaaaatcacactgtttatcattacataatggcttaatactttcctgggaaagaaattaagtaaaatgtatacatgaaaaatgctatctagaaaacagtgacattaactgaacaatatttgattaactaaaatctaaatttatttttaaaatagcaaatttgttcaccaggtgtggcttggttaaaacagttaactaacatcttcagtaatcttagaatttattagctttgtgtgtgaattctataaaatcaaggataaatcaaaatgtttttataacttctatgaaatgaattgcaaacatcattaaatatatacattgacatatgcatgtgtcatatatatatatatatatatatatatatacacacacacacatacagttatgcatcacttgataatgatccattctgagaaatgcatcattaggaaatttccttgtgtgaacatcacagtgtatttaaacaaacctagatggtacattgttactgtaataaatactgtaggcaattataacacaatgggaaatatttgtgtatctaagtatatctaaacataggaaagatacagtaaaaatacagtattataatcttatggccaccatggtatgtatggtccatagttgactaaaatgttatatagcacatgactgtatatttatatatatctttcttacatgcatgcccatgaagagagaggaagaaaagtcctattttttctgcatatttaaggccatatttgaaacatatgttttcatatgtcacatttactcagatatactcttgccaatttttataagactgagagggtagtaagaaaaaaaagactttaaaagaaacttgaggacccagtagaactgtatttaagtcacagctcagcagaattttgcaaatttgatccatgttatccacatgcaaaggtaaacccaggtcaaaagttaatattttgattctagttgagaaaaatatactatcacatgagcaataattatttccaaatggctggaaagtctactctagcaatatttattatatccacatactgagaattatagaatcaccaaatgttataacatgcttctatagagtgttgggtttttgaatctttgcactgccactttactatttgtattgatagtgtgttgcttagtctctctaaggcttctgtttctttattataaaaatgggactaatatttacatacaagaattaaatgagatcatgcatatgatgtgcatagttcattacttgcattgggattagcactcatatatggcaatttccttcccttctgagttttacaggtgaagaagtttatatttctcaaaattaaccagctggctgaaagttggacattcatcgagcttggaacatccagacctcatttattacactccttactatacaactatctttgggcaagtcacttaggctcattgaggttgtttctccatctgaagactgagataataatatttacctctcggagtcattgtgtggaccaaatatataaagtatttgaagcaccaatatctggcaaagagtttgcactcaacaaaatggcagctgttattataatccaggctaatttcccctttctccatagctctatgctgtctttgatgctcactcttcacattgattcccaaatagaaaatttttgtcttcctgatttatatcttgaaaaaaggtaaaaggatgtgagatggtggactctatccaaccttgggttgtattgtccagttgtatagacaagacgacagaagggtactgagaagatttaaaaaacaaacaaaaaaaaagaggtcaaagctaaaaagaaagttcatttatttcaaatcctaaattctgagaatctgtgctttgaggaatctacttgctttataaaacatcaataataatgactaatacttactgagtctttattaagtagtgccgtgttttacatatactgtctcatttaatttttactaaaatcctatgagttacttcttcttgcttttccaattttacccattaaaaaacccagagacctatcatgacagagccacatggctagtggggtgattaatcatcttacttcgcctgggaccttttgattttagcactcaaagtcctatgtccagggaaaccccacagtcccaaggaaaccaggatgattgatcaccctacatgtcaggatccaaacccaaatctcttctagttaaaactggagctaaaagccaccatgctgcactaccttaacaagtatagtcactggcagagtgagtattagtagaaaataacagaacacacactaattgatcataactcaataagcttcacattttcatttgaaaaattaaacagaactgagatgagagcagccctacataaacattagaaatgaatgacaatctgtcattaaatgagaggatagaaattttatcccctgctctgccagtaattactcaggtggtcttaagaggtgccattggttgttacaaaatcagagtacttcataactggaaggggtcttaaggtttattttgtataatgtcttgattttttgtctgcagagactaaagacaagcaaggctaagaccagcagatctggaataggacctgggagtctgaattttagtatgcaccacctctgatcccaatgcggagggtttgaacaacacattttgaaaaacaatggcttggagatatcagaaatactatcttttccatcatctccttgcaataattccatttgctagcaacaacataatatacaaatttctataataacctgttccagatctgctggtcttaaccttgctggtctttagtctccatagggataaaatcaaaaggttatacaaaataaaccttaacaccacctccagttataaaatactgattttgcaagaaccaatggcaaatcaatgtttctgtgagataacaaatatagaaaaaaacagaaagcatatgcacttggaacagtcttagcttttagattgggaaagtgagcctctgtgtacttatgtacttaggaagttcctctaagaacagaacttcattcctggattggaaacaggtcatgattaagttaatgacttatgtgttgtgatggttaatactgagtgtcaacttgattggattgaaggatacaaagtattgttcctgggtgtgtctgtgagggtgttaccaaagaagattaacatttcagtcagtgtacagggagagtcagacccaccctccatgtgggtaggcaccatctaatcagctgcaagcacagctgggttaaaagcaggcagagaaacatggaaggactggaatgccggagtcttctggcctgcatctttcttctgtgctggatgtttcctgctctcgatcatcagactcctgttcttaaacaggtggactcttggacctacacaagtggttttccagggactcttgggccttgagccacagactgaaaacagctttcctacttttgagtgtgatgagaattatagaatcatcaaatgttacaacatgcttctacagagtgatgggtttttggatccttgcactgccactttacttacttttgaagttttgggactcgaattggcttccttgctcctcagcttacagaccgcctattgtgggacttcaccttgtgatcgtgtgagtcaatactccttaacaaactccctttcacatatacatgtatcctattagttctgtccctctagagaaccctgactaatacatgtgtaaatactcttcttctggatgaacatagaaaagaagaacaaaggatgagtctagcaaagcttcagtagcactaaatatagctggccaaagttaacatctttttataagcatttagctgcctactctgggtgttagcattgcaattgcaaaaatgctttatataactgaggttatctgttgaatgacttaatgtttttgacattcttttttagataaaactgcctcaagacgtaacttttttgagataattatctctactaaaaatgaagtttacactcatgcttatactctgttagtttaaacccactttctataaatacttttatctttacaataaaaatgataaagcactagagggctatattctaacattttccattccaaaacagtataagaggcttttttcacactctagatcaatgtgtatcagttatggttcagaaataaaaagaacaaccttatcaggtagaaggtaagaggttaaatgcctttattttggagagagatgtaaaactaatcaccagagcaataagtatcttatgttattgttagaaaatggcattatggcagggagaagatggaaaaaagatagtatttctaatgtctccaagtcattatttctcaaaatgtgacattcaaaccctctgcattagaatcatagatggtgcttgctaaaattcagactcccgggtcttattccagatcttcctaaacacaatctctatgagtagggcttatgagtctgaataagtcaccagtatcattccagtgcatattaaagtttgagaactaatggttttgacattttagacatagtttaataaaactgtttggcaaatatccaggcacaaagatgttcactgcagctcatttataatagcaaataactggatgtaatctaattgctgtactgaaggattggcttagtaaatgttgatacatcatatgatgaaatactatgaggctgttaaaataatgtagaagaatacgtaatcatgttaatgacacaatgttgagtgggaagaacagattatagagtgctcccatttttataaaacaataatatcaaaacaaaacaaaaaagtcacatattatattcataaaacaattgtttaaggatgtatcctaattctctaaaatggctctcctgtgcaatattggtaataattttgttttagtatctttattaattatgagcttctgtattccctataataaagatgtcttgtttttcaattttaaaagtataataaaagtcataataataaaatgatacaacattcaccttgctattgatgggacttagaaatatattcggcttcaagatatgcaatatcaaaataaaagaaatgctcacatattgaaataactgtaatatgaacctgctaccttgtagtaaaataaaattatattcaaaaattagccaacttatatggaataattgacagacaaataactttaatgttatgctttttactgcataaaattctttctgaaatacatgcctaaagtaagcaattccataataattgacacttacaatggatgaatgttaaatttattattattattttcctttttgtttgtttcagtttttatccaagatatttaattaatttctttgtttaattttttttctttcaaaagtagacaataaactacttaatggcctttaaaacacaggcatgcacattactagggttaaataaatttctgtggttcttaataatctcacagtctctgatatttatttcatatatatatagagaggggggagaaataaaatttctataagaaaatccccttaagatgtgtgtgtgtgtgtatatatacatatacacacatacagtatatgtatacacacatatatatatacatacatatgtaaacatgtatatacatatatatatttatacatatacatatataggcattgcaggaaagaatgtttctttcttggcatgcagtgagaccacatctccagactcccttacaggtagctatagagatgtcagtgagtgttacattacatgctcattgattataagttaaggaaatgtgtatgggtctgtgtatgtgccactttcaggcctgccacataaaaattttgtgagtacaaccccctatttctcttcccctctgtagcccctcaccatgtgttgaagatggtagagtcacaagatggaagaagccatggtttcttaatcattatttacatgagagacacttgccaatcagaaacacttaatttggggtacacgagccacagataatcttctgttggggtaatccacaaaaatttagcattttcttgttacaggtagtactattttatgtgtatatctctaaaggagttcaacctatcttaattgtgtttccattcctattaatttcccaattaatcatttattgagcacctactacctttgatgcttgtgtcgggtactgaaaatgcagagatgaattaggcacctccttttgcttaagcacttacagttcatttgaggaaaaatataatagacagataatcaccagtatatgatcaaagctgtaacagagaacttagggtttactggagtacataacacttttgcaagttgaaagaaagtgctagccagttgtgacatcgacaaaaagagaacacctggactgttgcagacaaaaaaagatgtagatcaccccataaattggacatttatttttgctttctgtctatctgcttctccagtcattttcatttagtctcattgctggctcctcaattaactgtctttaaaacctaggcattgtccaagctgctatccttcaaccatttctcttttcttttctttctttctttcttttttttttttttgagatggagttttgctcttgttgcccaggctggattgcaatggcatgatctcagctcactgcaaccctcgccttccaagttcaagtgattcttctgcctcagcctcccaagtagctgggattacaggcacctgccaccacacccagctaattttttgtatttttagtagagacggagtttcatcatgttggccaggctggtctcaaactcttgacctcaggtgatccaccgcctcggcctcccaaagtgctgggattacaggtgtgagccactgcacccggccgcatttttcttttcaatctgcctactcaagttgaaaatatcatccaagacaatgaatacaaatatcttctgcctttttatttatgacaccaagtcagccttcagcctgacaactgtaggagaatgatttgcctgtgtgactactcactctgttagcctggacacatggacacatctggaaggaagggagacaaaacaacttttgtacccctagcacttagccagtgcctggaacaaaacatatgctaaataaatcttgctgaggaaagagtgaagcatatagacatactcatctccatttcttcaactgcaagaaattaggaaagaggaaatggtattagatattggtgttactagcaatgtagtatttgtaactattattataagtcaggcataaagttgaaacacataatagggaatttctataaaaattccaaaacttcagccactcaaactggttgggtctctccccatgttcaaatattctttcaaatatatagacatcatgattaagtattttcacctattttgttttaaataagaatgaaggatttcagacactcagtgctttcagtgagcctacactatgcagagcattgtaaaggtcagcatgttaaatagtcagataggtccaggaagaagacagtcataggcagaggatgtgttttgttttatcacttccaatgccacattccttttttttcctgtccagttagtttgatgcaacattaagttctgtaaaagtaaagtttccctgtacctaattttgtagtataaacaagataatgttagtgactcttcaaggactaggatacaatttaataggctattatcacagtggattaaaagtcatatttgcaatcttaacatattatatgccaatagcagacattttctccatatattagtctttcatgtccccatgaaattgttaataatgcactaaagcaataatggaaaatgagccttaaatttctctaagccttatgccaaatgtttttcctcttgtctcattacttattatgtatgttttatcttaaaactgaatgctattattgcccaaataactttacaggaaacaaacaagtcaaggcaataaacatcctgtcctttaatatagaaaagggcattgtatcgacttaacacaatcaattttcaaatggatatttgtatatagaaaagatactcttgcaaaactaattctatataaaaatgaaaatttctacctcaggttaacacaaagataacagataggtttcaaacattcacagagcataatccaaatataggctgtgatttcatactgattagaagagacagaaatcactgaagtccttctaaagccaatttcctataactcagtcatcaaaacttccaaaaagtttccaaaaaaggaatagaaaaatctctcattcagtaatattctactgtatattctcatcaacaagaaactcgatctgcaactctaggattcaattaaccttttgtaaatagcattgtacatttcctggctgactttaaaaaataaagtcaattctattttgttagtagaggaaggaaaaaaaataaggaaaaacatgagttctgtcaattatttccttcacagttacatacagtaatagaatcccaagtgtagaaaagaaactaacattgtttttttagcagctaaaaattatgtcttacagtaagtataggtaaaactcagccagtttactctctcaagtgttttgaaaagtttctcacttgaggaaccaggggtcaaatcacaaccttaaaagaaatacaaaggatctattgtcttcattctcaagttttatttaaataccaataccaatcaaaactatgtgtataaacatgaaagaaaaacctaaaaccatcatttaagtgatgatatatttataatgataaactgggtatgtaaatctagaataaactaacaaatattgggctgtgggaggaaaggggagacaaagtaaagctaagttccctttccacatgcagagagccagaaatgttgctttgcttttggctttgatattcagataactacaaaatatccccttgataaacaaactatggatcaaaagaatgtttatattaaacttatatttaacattatagctactggtaaagcataggttcatgcttaagatcaggataataatagaaacttagtaatatttattgtattacatatattgtataggtagctacttgattcttataaaaactgtacaaaaaactgttactattcccatgatacagatttggaaatgaagcttaaacaggttagtttgtccatagtgacactatcaactgtacagaggttagtttgcctggaatgagaacagcaggctggttccatgggagctttccacaggccatctaggcctggctccagccttgcttcagacaaaaaagaatgtctcatgtggtctgaggactcatggcaatgtgtgtgcagacctccctctagccacctcgtcttttaagacctctcagttctaactgaggatccttcagagttttgagaccaggtttagctgatatcaatgttcatagttttagcccaaatgtaacattgcccccatttttcaaaaacctctaacaaattcagtaacccaatgtgaggaatagaaataggaggcataaaactataagaaaagtgaaggcaactttatccttatttgattacaacctagtttaatgtaggaaacccagaaaaatcaactgaaaaataattgaaaataagaatagtcaggtaagtttgtccagttttaaagtaaaatatgcaaaaggcttttatttataaaatcaaagaccagttgttaaaattaccacaccaacatctcatttataaaaacaaacaaaaccaaaatgtttaaaaataagctcagaaagaaataagtagaacttagattaagaaatctatacaacttttccaagacttatataatcaagactgatgttcctttgaataattttctaagtttaatgttattgcaagaaaatcatctcttttttagttttttattttactttttggaggaattaggccatgttataaaatataacatggttacggtcttgctctaatacatataaaattttaccatgaagccacaataacaaccaaaagtgtggtaccttcaaataatcaacagaaagtttagtggaaaaatacaaaattcccttaaatattttcttatataagaacttagtatgtgtcaatatgtgttacaggaaacactactagctattgggaagagaacaattatataagtgttaggaaagtgactatgtacgtgtgagatgaaataagagcaatattaaatactgtaaaagtattctgtagagtttcatcagcgagagagctaattctccaccagagacgccaacttagcaataatatatgatccaaaaagttttatgaaaagtctagaaaccagtcaagaagttgcagtgcctgaggcaaacttaaagaaaataatagtctcattgaaacagatgagaaaaggcatttcacgtcaaccatgacagcccttcctccaagccagcacagcttggtgtcatcaggaaaaataaatcacaccttatgacttctcccttaggagagaaagagaagagtggaatgtatgtccaatgttctggtttttcagagtgttgtctgagagactggtttctgtcttgcctgattcagagcactaatggaatctacatactttggatgcctggggtctgcagagagcaaaaggtaactcagtggcttattgcaatgccacagaacctgcagtggtacagacagacaccagacggagaaggagattaaaagctcttggaagaaaaagaagcaaatcactctaactgggaaagaacacacacaaattcaaagaagatgtatcccgtggtaaaaaaaaaaaaaaacaaaacaaaactggagaggctcccaaaatctctatgtgggctaattggtaaaagtcttcccctgtatgaagccaatttataaggactgaagaggtggctgctttttcaaatgcacaaatcacagaaaaaaataactaggcacacaaagaaacagggaaacatgacacaatcaaaggaacaaaatacacctccaggtaccaaccagaaagaaataaaaatttatgttacttggcaaataattaaaaataatattaaagaagttcaatgtgctagaagagagcacagacagaaaactaaatgaaattaggaaaatgatgcaggaacaaaatgagaatatcaacaaacttcaaaaagaaaacaaacattcatggagatgaatacagtaattgagttgaaaagttcactagagcatttcaacagatgactccatcaagcagaagaaagaataaatgaactcaaagagaggccacttaaaattatgaagccagagatacaaagaggaaaaaaagaagaatgaagaaaagtgaagaaagactaagaaacatatgggacaccatcaagtgttccaacatacacataatgcaaatctgagaaggagatgatagaaagagagaaggacagaaagcttatttgaaaaaaacaatggctagatacttgccaaatctgaggaaggaaatgaacaaccaaattcaagacactgataaaactcaaacgtggaaaaaccaacataccaacataaattataatcaaactgtcaaatatcaaagacaaaaagggaatcctgaaagcaggaagagaaaatggctcatcatgtgcaagcgaccttcaatgacattagcagatttctcaggagaaacattataggccagaagggagtgggacaatatattcaaagtgctgaaagaaaaagtctgtcaaccaagcatactctttctggcaaaactgtattttgaaaatggaggagaaataaagataaacaatggctaaggtagttctttagcactagacttgacttacaagaattgctaaaaggagtcctttgagttgagacaaagtatgctagacagcaacacaaaggaaaaggtaaatatttagacaaataaaaatcgtataatattgcaatggtggtgcataaattatttttaactctggtatagaacttaattataaaatataaatataaaactatgttaacaaatgcaaaatataaaaagctgtaatatgtgacattgataacataaatgggcagagatataaaggagtagagttttgtatagagctgtctgctaactatgatatcctaaaactgaaactgtggcctgagagcagtcctgtctccacttagcgacctgtcaggactcattcccatccatgttctcggagacaggcttgccaaacttggttccacagcagattctgagatggccctataactttgctccattcccacttagacttggcccaaggtcaatcttgtccccagagatgtatgcccatccaactccctggaggcaagtcctctcagatgtggaccctgaagcagcagtgacttagttccaagctctctcatgttgatctggggacggttctccctacccatagacatactcagagagccagggggagtcctccagaaacccagagggaaccacgcctatctgcatacctaataacaggtctgccattggtggaagagaaggttgttaaaatcagcctgtaaagaccgaaagactgtttgcttcttcaaattcacagacaccaatgcaagcctacatggataacaaataaataatatggaataatatattcaaaacattgaaagaaaaaagcctgtcaaataagaatactgtaccctgcaaagttagccttcagaaatggagaggtaaagacattcccagacaaacaaaaactgaggatgttcattaccacaagacctgccttataagaaatactaatgtgattcttcaagttggaatgaaaagctgctaaataacaacataaatacatatataagtatacaactcactggaaaaggtaaatacataattaaattctgtatacttgcatgtggtaatggtgatgtataaattatttctaaatttagaataaaagttaaaaggtaaaataattaaaaataaaccatagttacagtaatttgttaatggatatgcaatacaaaaagatgcaaagcatgacatcagtagcacaaaatgacgggggaaagtaaaagtgtagagtttttgtatgtgattgaaattaacttgtcatcagcttaaaataaaatattataattaaaagatgctacaagatgttttttgaaagtcccatagtaattacaaaggaaaaaaaaaaaaaaactctaatagatccagaaaagacaacaaggaatcaaagcacaccactacaaaatatcaacaaatcacaagacagcaacaacaaaaaaaagcacaagaaccacaaacccatcagaaagcaattttttaaatggcagtaataactccttacctataaataataatcttggatataaatggattaaattattcaatcaaaagacacaaagtggctgaatgaattaaaaaaaatccaacaaaatgctgtctcatattgggacaataagagactcacttaagccttaaggatacacataggctgaaagcaaagggatagggaaatatattacatgaacctcaacagaccaatagcaagtaagaagattgaatccataattaaaaaaaaaaactcctaacaaagaaaagcacaggaccatgtggcaacaagggtgaattgtagcaagcattttaagaattaatacaaatgcttctcaaactcttccaaaaaaagtgaagagaagggaacacttccaaattcattttatgaggccagcattaccaacagaccagaatcagataaggaccctataagaaaaaaaattacagggcagtatccctggtgaacataaatgcaaaagtcctaaacaaaatactagcaaactgaatttgacaatacattaaaaatataattcaccatgattaagtggaatttatcctagatttgcaagtatgatccaatatacacaaatcaaaaaatgtaatataccgaatgaacacaatgaaagataaagatcatatgatctataatcatctccatagaggcagaaacagtgtttgacaaaatccaacatcctttcatgacaaaaactctcaacaaattaggaatagaaggaatgaacctcaagacaataaacgccatatttgagaagcccacagctaacatcacactaaatggtggaaaactgaaagctgcttctctaaaatctgaaacaaaacaagaatgcttactcttgccatttgtgttcaacacagtaatgaaagccctagccagagcaattaggcaagaaaaagaaataaaaggcatccaaattagatttgcagatgacattttctatatttaaaaaaaaactctaaagacttcactaaaaaactgtcataattaagaaaataattcagcaaatttacaagatataaaatcaacatacagcaactagttgcacttctatatactaacaataaactatctgtaaaataaattaagaaaaacaatcccatttaataatatctaaaagaacaaaatacttaggaatgaatttacccaaggaggtgaaagatctctacacttaaagacattaatgaaaatgaaaatatatcccatatttatggattgaaagatttcatattgttaaaatgtccatatgggatctacatattaaatgcaatccttatcaaaatttcaatggaatttttcacagaaatagagaaaaccattgtaaaattcatatgaaaccaaaaaagaccctgaatacccaaagcagtcctaagaaagaagaatggctgggcgtggtgactcacgcctgtaatcccagcactttgggaggcctaggtgggtggatcatgaggtcaggagttcaagaccagcctggccaagatggtgaaatcctatctctactaaaaatacaaaaattagccgaacgtggtggcaggtgcttgtaatcccagctactagagaggctgaggcagagaattgcttgaacctgggaggcagaggttgcagtgagccaagatcatgccactgcactccagcctgggcaacagagcgagactccatctaaaaaaaaaaaaaaaaaaaagaagaagaagaagaacaaagttggaagcgtcatactccctaattccaaactatattacaaagctatagtaatcaaaacagtgaggtactggcataaaaacagacacacagaacaatggaacagaatagagatcccagaaataaaccctgcatatataatcagttagtctttgacaagggcatgaataatatacaatggggaaataatagtctcttcaataaatgttcctgggaaaactggatgttcatatgcaaaagaatgaaattgtatccatattttattacatacaatacaaaaatgtgcttaaaagaaattaaaacattaaaccacaaaactcctggaagaaaacaggtggaaagcttcttgacactggtcttggtgattattattttaatatgataccaaaagtgtaggcaacaaaataaaaaataaatgggactacatcagacttaaaagcttttgcacagcaaaggaaacaatcagcaaaatgaaatattttctacatatggatgatagaaaatatttgcaaaccatacatagttttaccttggtatccatgggggattggttcaacctttcccaccctctgcagaaaccaaaatcttcagatgctcaagtcctgcatataaaatagcatagtatttgcatataacctacatacatcctcctgcatactttaaatcatctctatgttatttataatactaatactatgtaaacactatgtaaataattatactatattactttttaattatttttattgttttattatgttttttcaaatatttttgattctcagataattgaatcccttgatgcataacccacagatacaaagggctgagtgtacctgatatgttcaaaatacacaaaaaaatcctacaactcaatagcaaacactccaataacccattttaaaaataggcaagggacttgaatagacatttctccaaagatgacatacaaatggccaaaaggtatataaaatggtgttcaccatcattaatcaccagggaaatgtacatcaaaaccacaatgcggtatcttctcacacccattaggatggtcataaaaagtgttggtgactatgtggagaattgggaacgcttgtagcactgcggtgaaaacgtaaattggtaactccattatggaaaacagtatgaagattcctcaaaaaattaaaaatagagataccatatgatccagcactctaatgtttgggtatatatccaaaggaaatgaaaggagcatgctgaagagatgtctgcactgtcgtcttcattgcagcattattgacaatagccaaggtatggaaccaacctaagtgtccattgacaaatgaattaatagagaaactgtggtgtatatacaatggaatattattcaacagtaaaaagaaaaacaaatcctgccatttgagaaaacatggataaacctggaggacattatgctaactgaaataaaccagacacagacagccagatgctgtatgatcttgcttatatgtgtaatctaacatagttgaactcataggaacagagagtagaatggtggttgccagaatctgggacatggtagaaatggggtaatgttggacacagcatactaactttcagttataagacaaatacattatggggatttaatattgcagcttggtgacaatagataataatactgtattgtttaagtttgctaagagagtaaatgttaagtatccttaatacttaatccttaccacacacacacacacatatacacacacatacatacatagaataaggtaaccatttatagggatggatgcattgattaatttattgtggtaatcattatacaatgtatacctatatcaagtcatcacatgtctacctcaaatatatacaatttttatttattatttataccttaataaagctggggaaacaaaaaacaaaatatgcttatcctctcaaaataataaaacattagtcatttatcaagcctttagatttaactaataattatagaaaattcaaaggacaggttgaacaacacaatagagatacaatcagcaaaattgaacctatgagaaactctgtaagatgtatgacccagtttttttaaaagggtgcagagagaaaggatagaaagaggaaatttatagtgtaaaagagaattcagacacataatgatttcgatctgttaaccttagttgctaccatttcataccaaaaattaaaattatttaataaaattgttttaaaaatcagctacatttgataataagaaattattaggaaattttttaggaaaatttacaagcatcttaatgttattgaggtaatttttaaaagactatttttagatacatactaaaggacttacagatgaagaaatattgtgtattgaatttgaaaataattgtagaggaaggaaatatgggtaaaggtacagatgaaacaagaactagttgtatatcgagaattgttaaaactgggtgatgagtatttaagatgcattatattaggttgggcgaaagcaattgtggtttttgccattaaatggcaaaaaaacacaattactttcgcgccaaccaattactattctctgtacttttgcatatatttgaaattctcaactacgtatttttaagtataaaaatgtataataattttctcctttagtttacagaaggagaaataaggtgctgtgcaaaaaggaggtatccctgcaagcagaagagtcaccaaagtaaaacagtgtttgcatcaccattttacctaaggctggctctaaaactagggttaagcaatatgtcccccatgccctatgagaaggctgagaaaactaattaaaacaaattcataaattgctaagtattcctcagagatagacgcttgtatactcaacacataataatgatgataatgatgatacaggatattaaggttatgtggcactgctccataatagaaatttttcccattgttctgtgctgtaaacatgatgatgcataggtctaatccaaccattaagtatccattaaccttttaaaaattaagtgcttcttttcttttttcctgaaactaagcaggagaaaatgttatcccttataaaataacatttaacaaaaatctattaccatatccaatttcaaataaacagcaagtttccaagaatttaataagctattgctttacatagttagcatacagcacctcaggactgcattttaaatacattcatttctagaactcaaattcagggctttagactttttattttcccttcaagtttataaagaaatttttcatctttctggattttgaaaatattaaaatgctagaccttcacaataaaaggtgcatagaatttctattaaaaactatatacttaactatgtgttcctttgccacatgttggcctctgaacattattttctaggttagttatagtatgatttttcaaaacgtcaccttcagttaccaccccaaacaatgaaaactgaaatcagttctcaatgatttgatttgttatcatgggtcttcttgaaggatagaataacaaatcatgccaaacctcaaggcaacgtgtgttttgtaagttaaattacaaataccagggaataaaagtatatttgcatcacgtaggaatgattaactgctgcttagatgacacaaaacgattgaaaatggaataatcactgtcatcaatatggacataagatataagatatagttaaatatcagaaaaatctcaactattggatattttcatttaaaaatctagccaataatttcctgtccataccataaataaataactggcaaactgctttctcagttttgttaccacacatacctacactactttaactttactatgcttaatatttaatgtaaaatacataatcccattctatgtcactgtctgataggctttcagggttggcagtaactttaaatgtcatctacttcagtatttcccttgtttcatgaccctctacttatattgttaattactttttcctacagcactgacaagtagaccatgattctatgtttgaatatctccaattatgaaatctacaaatatttaattagctcctactacatggcaggcactgatttaggtgctctgatatagctgtaaacaaaattgacaaagatctctgctctcaaagagcatatattctagctgctcctggaatggaattcaccactcgcaacctgttttgccacatttattcagttaagagtggctgagtacaaacattgtcagaaactcttctcggtactgatgaacaaaagatgaataaaatagccagtctcaagtcactataagatagttattctatatggttaatggaaatatgttttcttattattaataccagtgtttaacattttggggacacaaagattgggtctaattgctctgccctatgaaagctctccagatatatttatatctctccaaccccaaccttgttttacaggccatgaattccccagtccttttttatccccccgggtgttagcaccccgattgctataggcaccagaaatttaaagtaaatgagtaaagtggtctgagaggaacacaaacacaggatcacacaccctcacagtagcaagagtaaatcccagaaatctatatttaatgagacatctactaattttgaaacatctgccgcaaattcaaatttctaaaaaccccatatgggccatttagaacacatctgaaggccataagtttggaaccacagctttaggtattcttcacgtgacacagtttggactcatctttccatgaggattgcaagttttaggtgtacactacttctcaaagttcttaaagtgaattgcccaggattggggtcatagctctagctatgggagaagcaacataaatttacagccaaatcattaccttttctattctaaacccagttctattcatgaaacccaagaatgaatgaatatttgggggaaataatgtcatattattgatttatgcttctgtaactaccacctaaacctacagttgttattaaactatgtctcacctttgctcctattgctcctcaaacaacattagttcctacttctctctggtgttttagactttatattttcattttagtattttgtcttattatatttacctctcccatttagtctgtcaagtaattttgtatgctgattttgttaacagccatattagtggttcctgccatttttatttcatctgtggattagctccttatgccattaataccaccctcaaaattaacaatgaaaatggtgaacaggaaatgtgaagaccaaatccttcagccaattactagaggtctctctctaaacattgattcatgaatacaggcattcagctgttactctgcctaacagtatcatcaactgccttcctacatcttaagcataagttcatcatggaaggtttttatcaaacgttgaaattcagatagacagggggagcagcactcctcagatacactggtcttatgggaaaagtaagttatttaatctgatatgctttactattagtgacctaatacaagctccaggtgatcatcactttcctttctaaaggctcacaagatttttttttaagatccattgaagaacttttcctaagattaatcaattgattgattcattcattcaataattatttatcgagtgcctatattaggcactggaaatacagtagtgtgacaatgacaaacattcctgccttcatagaatttcactagtgtaggggaagagaaaataaacagtataaacaagtgagctatatagaatgttagcgtcatgtgtttaggatataaaaagcactaaagtagatagaatgtgttaaaatcagatcaagttagaaaaattttttaaagtttattgagcatacaaaaggacagtttgcaaaccagggacctcaaatcaaaagtggtaagaagctctgttcacagcatttaaaatgcagcttataaagcataattaaggaactgcatctgtcttcgctgtggttggctatcataaacttatattccttttaggacaagtaaaactgtttaagctgatttgtctgcagctgattggtttaattttactgagtcatgttgacaaggatgaaaagctcacatttcacgttttgtttatggttagacctagtattttggagaaaattgagataatttaaattttggttatgtggctaatggcagttggtcttggagtatgtacattgtggcctctattttttttaaacaaaagtctatagaatggggagtaattttagatagggatccatgagaagcctctgtgaaagtaacatttgcaaaaagaactaaaagaaatacaattaatgtcctactccctaaggacataagtggggagaattcactttcctcttcttcctgaaaattagaataactcaatcccatctctaatatactgttacgtatttcctcaaagccactggcaagttatttaacttttatatgtctactcatttgtagaacaggcatgaaaatagtgcccaccgcatgcagtaattgtgaagattcagtgagataaagcacatagtttgcaacagtgcaaacacttgcaaagcacaatgtattctgaaacatgtttctctaatgcaaatacattcatacaaaattgataaattaggggtacatgtcaatataccatggacattttgtggattcagatgtgattttccccagcacattatgttttcacaaagtaaaaatcagtcaaatgcaaatacacaaaaaagtttatcactccccaggggtggtatgtggtactgcacatgacatctgtgtacccctcatacttcctcttgcctcattttggccacaggctttgtgttcataaagcctattgcatggaacactcgattctttgtgcattttgctcttgtcttatggtgaaatgttgtatttgtttcaaatattatgatgcagactgaatatcttctacaacataggatagctatctaatgtgcaattttgagattatctttagttctaaatcatttttattttactcaattttataggtagtaatgattttttaaacctttgtagtaaacactagtaaagcattcagttattggtattatctaaaataaactcaaactaaaacctcttaataacttctcacttacatcaacaacagtaaaaagtgtgttctgcatggcacaaaggccatgcatatgtgagatgaaaatgaattgtatcacttcacaggagaaatttatctcaacctgcactgtttctcaggagaggactgatgcaaacacagtgctaataaagacaagattgtaattctgattccttaccagtccctgccagcttcactgaggaaaacaggtctgcaaacacaaaaggccccattagttccagcaatcacttcagaaaagatgtcatttttcatagagaatttcaaacaaaagaacatggacagctcctcctaagtggtcagcactattgagagtgagaaatggagctccagaaagggcatgttctgctgatgggtgggtcaaagacctatgcatagattcctcatttgaatatctatgtggcatgagaggaaaagacaaggtgcaggatttagcctgtggcagtagtttgctgacacctgtcctagactgttactagatgagaacaaataatacttggcaaaaacgagaagtctggttaaaaatgactgttattcgtgagtgctgggaaaagcgacacacatttgcaaaagtttttgtaacaacgtttacttctatacatttcttaattttatgccaaagagaccatattacacaaagtttttattaagccctgtcttttctactgatactatattgacattaaaaacagcagtctatgcataggtccttttctgctgttgtaccacatggcagtttagtatttgtagcagaaatgatgtggcccacaaagctggaaatatttactaccaggccatttacagtaaaagtatgctgacccttgctctaggacataaagaagcagcagagcaaaatatggagaccctgtttcctaattaataactcggtcatcaaaaatcttaattacagcaattcttaaaaagtggttctaattgacagttatgttctcctcagactcaggatccacaaaggaaccgggtagtggagaaataaaggctctcatagacattaaaaatccattctaaatatgtagatgctatagatcttcaggctactgaccatgacagccactaaccgagacatcactatcacagtggtgcatgaaagtaggactcatataaattggactataggtagaaatgctgtgtgctgactcactgccaagaatctcagaaaagctataaaaatgaacaataatatataaaaataagtcagatctaaaaattactccctatcaatgcctaagatacattcataattgaaatctttaaaagaaattaattgaactttttaatgggccgaatgagaaggaaaagaaactatcctcccaacaagaactgcatgagtgcatgctactttttccttttaatgtatttcttttgaatgccactctaaatttctcctttttaatcaagaaactctacttttcttaaacatgactttaaatgatttcattttattctattcagaattttcaatggaaaacgaaagtacaatgtgactttataagagagcataagctttcagactgaaataataatcagcatgaggaaagataagatgctcagaatgattcagaaaaaatcctgacttctgcaactgagacataggagtaccggcaattccgatttccctctgggtaggaaccattcaaggaagacgactgctataaccaaaaaaaatggactattctacagatggaacaaaagatggcagagatagcatcatttttttgaactgtgtgagtactacaaatgccatcgacagcttcatagcctgacagtttctgtgtgggagtcccctttttaggaaaacatcatattctcaagaagttaaagattagatcattgaaataattgaaggaacaacctgaatcccatgaaaatttaaaggggttctgatgcatgtcaggagctaccaatttgctgccatcgtattctaaccagatgtctttttccacctatggctcaagatctgcccacatgctgtgaacaagttttacttttggctataattatgtttggagacaatggctccaaactaccaaatttttctcttgcctctgcgccccatagctatttgtctcaacatactgggtatatctaattcttgttttcctggatttcttgcctgtgtccctgatttctgctctctgactccataagcttctatatctggtttagattcatgagtgccctgactccgcttttttggaccccgtataatcctgacttattttctggttccaaacttcaccatcactgtgtgttctcatataactgtgatccctgatctcaaacttccacctctcccaaggccaacagcttttggccaagaactaatagtatctaacaccaacctttcttctcaacttttaacctttttacctttaatcaccttgagctatgcaagcgctgatttctgattacaacctggtcctgatatgataaaaccacagttagtccattcaaaacctaactgctggtctgccaagtacaccattaaaacatagtagccattgttaagtaccactgtgagtacctcgtgtgtgtgtgtatgcatatgtgtgtacagttgtcacaaagatctagtagcatctgtgtcatgttttctattttacaagcagcaaataagaatcccagaagcacagcaatttgccctaagttatactactagtaaaaggtacaagaagttgacaaatttatttctgtccagctaccaaactactctgtgtgagagattgttatatgggtgacccataataaatgctacctcttggcactgccacttcatgtagtttctcccatgttgatcctggccttgccatatgacttactttggcacattagaaaaattatgcaagcaaatgctagataagtgcttgcacattgggcaggcctgttcctttaaaacaccttcccttggagtcagcctccatataaaaaatctgaccagcctgcaagagaccgagaccatcctggccaacatggtgaaaccccatctctgctaaaaaatacaaaaattagctgggcatggtggtgcacacctgtagtcccagctactcaggaggctgaggcaggagaattgcttgaacccaggaggcggaggttgccgtgagccgagatcatgccactgcactccagcctggcaacagagcaagactccaccttaaaaaaaaaaaaaaaaaaaaaaagtctgaccagtctgaatcagccatactattaggaagcccaagatgattccacatagaggccatatggaaaagctcagaggtgccaggtatatgactgaaactttcttggaccatccagcccagaccagctattgactaaatgtagccacgtaagtgacctacctaatcaataccacatggagcagaagacatactcaggaaaatcctacccatcagaaataggaaactgttattttaatccacaaagtccaactcaggacttgctggcttagaaaataatattatttctcattctcaacccctccagatggcagaaggttttcagagtaaaaaatggtctctgatcaaatcaagtactgctagtacaatgtggcctcagggtaaatatcaagtcaagaatgtggtagtaagatacctcttaaaacccttataagttccactctgctaggagacaagggtgattaaactcttaaaaacgttactgcacaggattctgactctcagtctaaagaagaaaagtgtctgtcttaaagagacttggggaaatagctttcgcccaatggaatggaatataactggatacattagaaaattacaaagtttaaaaagaagctgtgccaccttggaagaaaagggagagtgacaggacaaaatgaaaagaagattttaggcctccaaacctttaatggaataaatagtctcacaaagtgactccgtttgcgaatgagggccatttcttacagaaaaggaaggttaacttagaggagagagtcaacaggcactgaaaacaatggaatagaaatccacatccagagaacaggatccttttcaggaaacctagatttgagggaattggtaacatgttcccagctggatctcagaatttttatgaagcaccgattgctatgtgcctctcatttccctccttttgaatggctgactttcttgctagcgatacaacaatccctgtctcatcaatgtatgttgcagggaagggggattacacagaaggtatcattttaggtacaagtatctagataaagagggaacatcaactttaaatatacccaatttagattatgtgattttggaccttgaagctgggcccagcactgtaatgtgatgagactttctgaaaagggacaagaagtgctgtggccagagggaagattgtgatagctagtctccaactattcccctcatccctgcccacatatgctattcctcacaccatgaagtaggttgtagttttcttccccttagctatgagctagacctgtgactttctttcaccaatagaatgcaacagtaatgatatcccgggactcctgagctcaggtctgacagacccacttgctctccctgggaagccagctgctatgctgtaaagaagcccaagcttctttgggctaaatgatgagacactacacagagagtatgatgattaactttatatgtcagcttggctagcccatggtacttggatatttggtcaaacatatctatattgccgtgaaactattttttagatgagattaatcagtaaatgagtaaaatagagtaccctccataatgtggatgggcctcactcaaagaattgaaggccttaagagcaacaataacaaaaacaactgatgttctcaaaggaagagggaaatctgccagttgatagccttcggatttgagttgcaaaatccactccttgggtcttcagtctgctggaccatcctgcacgttttggactcaccaacttccatgaccaaatgaaccaattcttttttttttttttttgagacagagtcttactcagtcacccaggctggagtgcagtggcacgatctcggctcactgcaagctctgcctcctgggttcacgccattcttaaaataatctctgttctctctctctctctgtgtgtgtgtgtgtgtgtgtgtgtgtttgtgtgtgtgtatacatacatatatatacacatacacacaggcatacctcaaagatatagcaggtacagtttcagaccactgcaataaagcaaatattgtaatacagtaactcacatgaatttttttgtttctcagtgaatataaaagttatgtttacattgcactatcctgcagtctattaggtgtgtaatggcattgtaactaaaaagtgtacacactttagttaaaaatactttatactagaaaatgctaacgatcacctgagccttcagcaacttgtactctttttgctgacagagggtcttgcctaaatggtggtagctgatgactgatcagagtgggggttgtgaaggttggggtggctatgtcaatttcttaaaataatacaacaatgaagtttgccacatccattgactcttcctttcatgaaagatttctctgtagcatgtggtgctgtttgataacatttttccctcagtatatcttctttcaaaatagaagtcagttctctcaagccctgccactgctttatcaagtaagtttatattatattctaaaacctttgctgctatttcaacaatgttcacagcgtcttcatcagatgtagattccatttcaagaaatcactttcttggctcccataagaagtagctcctcatctcttcaagttttatcatgaaattgcagcaattcagccacttctgcagttacttcctctactgcaaccttgaaactttcaaagtcatcatgagggttagcatcaacttcttccaaatgccggtaaatgttgatatcttgacctcttcctgagagtcataaatgttcttaattgtatctagagtagtaaatactttccagaagttttaaaatttactttgcccagatcctttagagaaatcactatctatagcagctacagctgtatgaaatgtgtttcttaaatagtatgacttgaaagtcaaaatgactcctagatccattgattgcagaatgaatgttgtttttgcaggcatgagagaaacattcatcttcttgtataccttcatcagagttcttgagtgatcaggtgcgttgtcaatgagcagtaatattttgaaataaatctctttttcctaagcagtaggtctcaatagtgggcttaaaatattcagtatatcatgctgcagacagaaatacggtaatacaggctttgttgttccatttatagagcacaaagagagtagatttagcatatttaatttaatttaattttaagttgttggatacacgtgcaggacatgcaggtttgtcacatagataaatgtgtgtcctggtggtttgttgcacctatcaactcatcacctaggacttaagccccacatgcattagctatttatcctgatgctctccctcccctagcaccccctgaatgggccccagtgtgtgttgttcccctccctttgtccatgtgttctcattgttcagctcccacttataagtgagaacatgtggtgtttcgttttctgttcctgagttagtttgctgagaataatggcttccagctccatccatgtccctgcaaagaatataatctcattttttttatgactgcatagtgttccatggtgtatatgtaccatattttctttatgcagtctatcattggtgggcatttgggttgattccatgcctttgctattgtgaatagtgctgcaatgaacatacatgtgcatgtatttttataatagaatgatttatattcctttgggcatatacccagtaatgggattgctgagtcaaatggtatttctggttctaggtctttgaggaattgccacactgtcttccacaatggttgaactaatttacattcccagccacagtgtaaaagcgttcctatttctccacagcctcaacagtatctgttgtttcttgaccttttaataatcgcaattctgaccggcatgagatggtatctcattgtggttttgatttgcatttctgtaatgatcaatgatgttgagctttttctcatgtgtctgttggctgtatgtatgtctacttttgagaagtgtctgttcatgtccatcagattaacagcagacctttcagaagaaaccctacaagctagaagagattgggggccaagattcaacattcttaaaaaaaaaaaagaatttcaaacccagaatttcaaagcagccaaactaaacttcataagcaaaggagaaataaaatcctttttaaacaagcaaatgatgagggaattagtcaccaccaggcctgccttgcaagagctcctgaaggaagcactatgtaaaggagaaaccattacaaaccactgcaaaaccataccaaaatataaagaccaaggacactatatagcaactgcatcaacaagtctgcaaaataaccagctagcatcatgatgacaggatcaaatttacacataacaatattaactttaaatgtaaatgagttaaatgccccaattaaaagacacagaatggcaagctggataaagaatcaagacacatcagtgtgctgtattcaagggactcatctcatgtgcaaagatacacaaaggctcaaaataaagggatggaggataatttaccaagaaaatagaaagcggaaaaaagcaggggttgcaatcctagtttctgacaaaacagattttaaaccaacaaagatcaaaagagacaaagaaggacattacataatggtaaagggattaattcaacaagaagggctaactatcctaaatatatatgcacccaatacatgaacagccagattcatagaacaagttcttagagacctaccaagagacttagacacaataacagtggtagacttaaacaccctactgtcaatattaggcagataatcaagacagaaaattaacaaggatattcaggacctgaactcagctctaggtcaagtgaacctgataggtatctgcagaactctccacccaaaaacaatagaatatacattcttcttggtgccacaagacaacttactctaaaatcaatcacataattggaagtaaaacactcctcagcaaatgcaaatgaactgaaatcataacagtctctcagaccacatcacagtcaaactggaactcaagattaagaaactcattcaaaaccacacaactacatggaaactgaacaacctgctcctgaataactcctgggcaaataatgaaattaaggcagtagtcaagaagttctttgaaaccagtgagcataattcttaagagccctaggatttttgaaatgctaaatgagcactggctttaatttaaagtcgccagctgcattagccctaagagtagagtcaacctgtcctttgaagctaggcactgacttctccactctaactatgaaagtcctaggtgacatctcttccaatgtaaggctgtttcctccacattgaaatctgttatttagtgtagccactgtgatcaatggcattagctaggtctgggtaacttgatgcagcttctacatcatttgctgcttcaccttttactttgatgttatggagatggcttctctcctttaaacctcatgcaccaacctctcctagcatctgacttttctccttcagcttcctcacctctctcagccttcatagaaataaggagagtttggcgcttgcttgagattaggctttggtttaagggaatgttgtggctggtttgaaccttctgtccagaccactaaaactttctctatatgagcaagaaggctattcgctttcttaccactcatgtgttcactggagtggtatttttcaatttccttcaagaacttctttgcttcaagaattcagaacttcaagaacttttattttttttttttgcattcacaacttggatagctgcttggcacaagaggcttagcttccagcctatttcagctttcaacgtgccttcctcactaagattaatcatttctagcttttaatttaaagaaaaagattgaaaactcttgaacatgtagaggccattgtaggattattaactggcctaattttaatattgttgtgtctcagagaatagggaggtttgaggagagacagagagataataaatggactaaatggatggttggtggagcagtcagaaaacacacaatctatcacttaagttcacaatcttatataggcatggtttttgaaaccctaacacaattatgatagtaacaacaaagatcattggtcacacataacaccgtaacaaatataatgataatgaaaaagtttgaaatattgtgagaattaccaaaatgagacacaaagtgagcacatgctgtggaaaaatggcatcaatacacttgttagatgtagagttttcacaaaccttcaattggtgaaaaaataaaatatctgtcaagcaccataaagcaaaacacaataaaatgaggcatgcctcatttgtatgtttatgtatacacacatacacacacaaacatacaggctgtatgtatacatatacacacacacagcctattggttctatttctctagagaacactatgacagtgaaagaaaaaagataatatacagaggagccctgaggcaccacagataggagtgaaggcttcctggaatttccagcccagaccaacccagcccagcccagctcagcccagtcctgtcaccagttgaatgcagctaggttgatgccacatgaagagaagaatcaccaagccaatacctgatctggcctaacaaattgtgaggaaaaaaaataattattgttcttaagccattacattaagccacaacataaggaagtgaaacatcttcttttcttccagccattctctctcccatcctagacataagcttaatcttgtttagagggttagctctgaaggaagtggaaggtcagcctataactgggaattgcccacctccaatcagtaaagtctgaattttattcaaaccaatcatttgggatcatgtttgcatttatatgacaatttggagatttttaatagccagctatttgttcatcttatagctgtagccttcatttaaggtctctttataaagatagataggaaagggggaaaatccagacaaaggaactataaggggaaaataaaagttagccctcctacacaaaacctcattggtccctagagtctctatgtcataatagattcaggaatgcagtcattggaatgcaagaagggctgctgcaagtggcaccaagtcactcaatgacatgcaacaagaacaactggacacagctttatacctcctgagagcagtgttaggtaataggcatagccacagaagcctttgagaatccaagcaaaatgaaatcaattaaattctgcctatcgctcttcaaggaaaatgtcacgctgtagccaccttgagacgcaagctcagggcacaagcagtgctataacgtggcaaacaacaaaagtggatgcagagtgctgtgcaaagctgctcagaataagaatttgtggtaattttaagcatgggatccatctgtcaatgcaggaaaatgacacatttgagggtacatttatttatgtaaggagtgtaaattttataccatcattagcatactggatgaaaagctgaggtcaaatttcaagtcaattaccggatgctctgttataaatgcaggaatactaaatacactaagaatattggtattgatacttctgtaaatctaaccagtgttcttcctctctcaggagaaagcaggagcagaccctgtctttaatgtcctggtggtggaccatttcaagtccatcctcaagaagcacatcttagcagtaaatattgcatttttattttatttttaccttaattttattttttaaaagagatggagccttgctacattgtgtaggctaatctcaaactcctaggcccaagtgattcttctgacttgatctcccaaagtgcaaggattgcaggtgtgagccatcacacctggctgaatattgcatgtttttgtgtaattagtagaaacaaacatccctcctctttggacatggagctgtattaatggctgctgtattactggctgctgtcttccagctgtggttttgtcaaagattccaatttagagagccagagtctggataggacagttttaaaggtcattttttgtagctttattctccttaaaagagctccttttccaaaatcagcttagcttagaagatgggctaaaaacgtttttgtagatggactcctctgtacccataccacctcctaaagttccctataatctttcgaataacaataaagtcaccatatttattgaatccttataacagaggagtattcctgtagaagaaatggggaagttaatttaagttatggagagtgcctagactcaagaattttatattcctttagacaaggtctttaaatgttttcctttaatcataatccaatttttaaaatgtgaaaaccaattatggctctaacttttttgctatacttacctctttctattacagacagggatatcaatgaagttcttgagagcatcccagctctctctctgtctaagatgtcacatccctcattacatctcaatgtccctctcagcctgcgctcccaggctccagatacagctgcgaagcctctattacaaacatattcctttgccgatgctgacccctcattgttatttggtaattacttatttccactttagttgactccctatcacagactccacagtgatgattctaattcattccattcttcttaggctcctcttgtgtctccctggtcctctaattagtaaggcatttctttctgtgccaagtggaaaccattacattgtctctctctcttatctatttcaaagacaccgagtctccctccatccgcatctctttcctcctccactgatgctgactcctcaacacatctatagcctcagctcgacctgtcaccagctcgggacattaatgctccattgaatgtccctgtgtctctagcacagtggttaaattcaggaggcctctggagcaaaacctccttctttgaatcctgacactcacttgtttgtacgacctctctgtgccttaatctcctatccaaaatatgaataataatagcaggatttatctcttaggtgtctcatgaagattaaattagctaaagcatttagaactctccacggtgcataataagcagtcaaataatggcagctattatagcattcagccctccttaaattctttctctacctcaactgttttcttaatttccccatgtccttagcatctgggctcttgttttcttatttcaacttttttgtttgaaagcatggtttatacctaccattgaacttgctcatagctgcctgactcaactcctagcaatttcagttgcattccccccaccaataatttcctagacctcagctccaaaggcctgtttcttttcttatctgtcttcatttccccactaacaatgtcttttaagcctttcttcctgcttcacatgcatcaatcaccctgatgctcctagttttccccttttcagatttctttctctacttctacaggtccccttctctccactcctaaaagggtgttacctgaagtttggctctattcttttttgtgtcactgcttctcacactagttgcattataaggctggctgaaacaaccttagaagcagaataattcatactattccaggtcagcaaacttcatgttttaagtcctgtaagtagaaaatattcacatataatgagtgactggaaaatatggtacatcagagttgttggggaagcaagtgtcactaacactgtaatcaaatcaaagtgaacgtatgcacgactgtgaccacagatatcactaataattcccaaccatagggctagtatttctctaaaaaatgggtcagagaattttgctcttgattttcctcaacatgtacaatgtcttagtaaaactaaaaaattttacaaaatacaatatttttaatattcactattttagctaaaactgtaatataatgagaaaagactaagaaaacttatactactacctagatggatttttccttaaaaaataaatagtattcatggttagaattttctaattcaactataagtgagagggagagagaaagagagagagaatttataaaacagtgtgtcttcttacaaaccataattgtttattttatttttgattgaacatgcacacacataaccactggttcaaccacatgtggttcaagtaccacaaatgtacttaaacaaaagttctgtgtacagacatgaaactatgcttagttgcatttcttgttgaagctagtctgaaaatagcaataagtctagagattctaactttagagaactgtcactctgtatttattgtttcaaagatgtatttatttaaaattacagtttcaattagaaatttacagaggtggtcacaagcagttatgtttggagcaaaagcttgtaagtggtaaaaatggaaaagatactgagatgaattcagaacaaccttgaagcatggggtacatcacagggcatttggtgatttaaggcatcatgtaacagtccccaagcacaattatggaactccaaatgagcactgcagttggccacaaatttgtaagtcatattttgatgttcatttaaaacagaggtttttaaatcacggtggagatacaaaatgagccttatttagctgttcagtggaaaactctgaaaaattgttccacggaaacatccattgaatatataacatataaatcaatttggaaaaacagtttgaagttaaaaggcaagagagcaaaatcttggttatgagcaatgcttcaaacgcacaaacaagcagagaaaaaaaaaaactgcttgaagtatcatcaaggtttgtttgtttcaaaagcagcaaggaaggtagaactcctggcaagggatagtttggtggagctctgtgtgggcaagttagattagatttgttctgattcaaaaagaggcacttgagatgtatttttgaggtgtatttttacaggacaaagcattgttgaataatcaagaatatgaagataaattggatttataccaattattagactgaagatacagatgtaaatgatgtaactactttattagttggcctcacttataaagtagtctgtcaagatattgccaaagaacttgaaagtagaacttatgaaaacgtttgcagcaagatgtgagcattagaagaaaaatgttagactcacatctatgttaagcaaacctttggaagcaatagtttgaatcaaagacattatgcccccgactactccagcaactaatgattttatttattcatcccaaagttttgagcttcttgaataccaaccactatgctagatcctggggattcaactccaagtaaagcagacatagtcttaactttaaagtgttttgcatttaccaagagaccactcaaaacaactttttttcttgatttttctcagcatgtaaaatgatttagtaaagctagaaaattttacaatataccatatttttaatatttattattttaggtaaaattctaatataatgagaagagacttagaaagcttgtgccactactagatgtattcttcctgaaaaatataaatagtactcatggttagaattttctaattcaaccataaattagtttatttccatgtaagtaacaaagacatcatgatttaaaaaaaaccctaaatattaatcacttaaacccaggaggtggagtctcactgcattcaatcagttgaacccagtgagacaagattgcaccactacactccagcctgggcaatacagtgagaccctgtctcagaaacaacaaacaaacaaatcctaaatattatgagttaatttattttttatacttaacaacaaattgtgggtcacatgggattgtctagttagcagatttttccctcaaagtcagaacactctcattcaactattaaaaaggtaatgtggtgatggtttttataaatggtagcaaaattataacatgaaatgatagtttgagagttgaatagagatatatcagaatgtgaataatttgaggctcagttcatttacatgtgcaaaaattacagcattagtcacgaaacaaagatcactattcatatttcttcattgaaaatgtccttgctaaatatttccatgggaatgtttaaaacaaaacaacaacaacagcaacaaaaacagtggactagagactcttttagtccacccagacaagtagacaagtgctccaatgactcagcagtaagatagacacattcacatttttggcaagagcagcctgacaacatggcatcatccttccatttatgattctggccttatcttcacacatcattcctcatgcacagatcataaaatctttaaagtgctcacatgtacttaattaatttgagtcctgagaatgaggaaacaccaagacaagaaaaagtgtagtgatactgaaccgaatgtatgtgattagctgtctttaactcagtccaattatacaggaaaatgataaactcgatgaataatatttaggggttagtcttttgctcatcactttcaacaccatgataagtccattagccatcccctcagctgttttcccagttttcacttctagccccatgcaacacattttccacaccctaggcagaggaatcatttacaaacttaaatcagatcgtttaatcttcttgctgaaaaccctcaatgatttgccgtggcatttaaaataaaatctacttctcagcatggtatcccagaaccgtgctcactcttcaatttcattctgcttcatgtttctgtagacttcttttttctccatactaatgagcttctcacacctaaaagcctttacacacgcaaattttttctgtccaggtgacttgtcccaaagtataactgtatcctcgttgttattcagggctcagttcaaaggttacctcttcagagaagtttagtcataccctctcattcccccgccatttttttccttctctctttttttctttttaattttagattcaggaggcacatgtgtaggtttgttacatggatatgttgcatgatgttgaggtttgctcttctattgaacctgtcacctaaatagtgaacattgtacccaatagatagtttcttaacccttgctccactccctccctcttccctcttggagtctctagtgtctattgtttccatctttatatctgtgtataaccagggtttagctcccattataagtgagaacatgaggtatttggttttctgttcctgctttaattcacttaggataatggccactagctacatccatgttgctgaaaggacatgactttgttcttttttatgattgcataatattccatggtatatatttaccacatggtgtatatgtacctaggtgtcaataggcacctagattgactccatgtctttgctgttgccccccaccactcatcatctcatcactatgttttacttccatcatagtacttgttttctgaaatatctcatccattactggtctcttgtctgtctccctctcacaacactgtaagcgtcatcacaggctttgccagtttcagtcacaggcatatccccagggcctggaatggtgtctgatgcatgctggacactcaataaagatttgttgattaaataaatgaatctcaatacagcaaaaccttgtccattagtgctggaatcaggaagaaatgtgtgactacatcatgcagtggaataaagaatctatccatatttttaaagcaaaacacatgatactaaagaaatgttgcattttgaactgtgccatcaaataacttgagttaaaactttcgtgtcctctgctgttctgggtattgtgaatgagttggaaaattctgagaatctctgttctatattctatgcctgatacgatcatgtcctcttatggcctcaactgtcattcacctccaaacagaggaccctgaaatacttctctcttatttcacttctccatttgctaaatgattcttttagcttacaccccagacaacatagactctatttgcccaaatacatcactatttcatggacccagacactcttcctctgttaatcacttatcactgtcaggctgataacctttgagctctctttgcctttttcttctatcttttctgtctctcaacttgactttttcctttagcttcatgttttgggggccccaagatttattttcctttcacactggatacaatgtacattatttgagtaatgggtgcccccaaagccctgccttcaccactgtgcaatctcaacacacatctgtataaaattcttcacatctgttcctttgtttctacagccactatcctgggtctgtctgccctcattgtttgcctaaactattgtgaaatttttctaattggtcttcctcagtataatttttccttccctccaacatatccaccaataaatcatgctctgttcatttcactcaactcaaaacctttcatggttgccgctgactgaaggaagtatcccaattacttgtataaaaatgagtaaaatccatgaaatgcccctgatccatattcctagtttacattcctcaactgcctctttcctcctatagttctttgctttaagacccttctgtgactcaacattctaaaaacttccttgcatttttttctcttttgatctttgatctcaatataatctcttcccagtatgcccttccaatgattcctaaattctaggcactcaatacatattgatttgctgaataaataaacccctgttttgcctcaaggccaagtcaatgacaacttctctaatcttcctcaatccctccagtcagattaccctttccctcctcttaaacatttatgatgcacaataattctattttagcatattgagctcactccactttccagtataactggttagatacatatctgtcctccccgctaaattaaaaattgctttatggctagggccattgttatttttgttttgtttttgttatttatttatttttacttgtataaatgtatggggtacaagtataattttgttacatgcatagattgcatagcagtgaagtcagggcttttagggtatccatcactcaaatcatgtaccttatacccagtgtgaaaggaaaataaatcttggggcccccaaatcactaagctaaaaggaaaagtcaagctgggaactgtttagggccaacctgcctcccattctattcaaagtcacccctctgctcactgagatagatgcatatctgattgcctcctttaaaaaggctaatcagaaactcaaaataatgcaaccattcatctcacttatctgtgacctgtaagttcccgcttccagtcttcctgcctttgcttcaagttgtcccgcctttccagactgaatcagtgcacttcttacatacattgattgatgtctcatgtctctctaaaatgtataaaactaagctatgccctaaccaccttgggtatatattgtcaggacttcctgaggctgttaggggtgcacatcctcaatgccatcttggcaaaataaactttccaaattaactaagacttgtctcaaatcttgaaggttcacaccagtaagtaatctttcatcatctaccacccgccaccaccaccctcttacccttctgagtctctgtttgttcttccatagcatcagttaggcagactgaaggtgattgttgaagttaggatggaggtcaagtgcttgttggtggtggtgatggtgatgatgtggtaaatggagtgagttgtggatgtgctacttgatggtacgggggccccagcatcccccatcctcagagacgggggaatttctcatactgtgcattctattttccaattctggctacctaaaatccccaattaacccaggtatatacaccagtgagctcttagaccataaatgcaagttacagaatcattcccatcatcaaccattgatgcctaaaatgctggattaaagcagcaactggtttaattaatcccaatatcctaaagccctaattacacagacttaaccccaatgtccatgagccaaacactgcttaaagagttggttaaggccgggcgcggtggctcacgcctgtaatcccagcactttgggaggccgaggcgggtggatcatgaggtcaggagatcgagaccatcctggctaacaaggtgaaaccccgtctctactaaaaatacaaaaaattagccgggcgcggtggcgggcacctgtagtcccagctactcgggaggctgaggcaggagaatggcgtgaacccgggaagcggagcttgcagtgagccgagattgcgccactgcagtccgcagtccggcctgggcgacagagcgagactccgtctcaaaaaacaaaaaaacaaaaaacaaaaacaagagttggttaatatccatgatcagtagagctgaaagcaataaactagatacttccaatagaacattcattcctacactcagatttctaaaactcgtcacattctgaagtcagcataaatcaaatcttaaaaagacacatgattttaaaataaactcgctccctattatatttcaaccatagataacatggcataaaattcaatgcttttgtgacacgagtttacctttataacaaaattgcacatataccccaaacctaaattaaatgttcaaaaataaataaataaatgaatttaaaaactcacactacctcgtaaggaaaatctacagtggcctattaatttttgcttttccgtgtaagttttagacccagattggcaagttcccccaaaataaacaagtcagtattttgacttaaattatatcaaatctacagatcagttgatggaccactgcaatttttatgatttggagacttctgatccagggacatggtatggaccttcatgttattttaattcaatgttcccataatttatgcttttgttgaaaatagatatagaataatgtaggacctaaaagaatagtggacaactaagaacacttcacattttatttgtgaaagaatattttctgttagtcagagatatgaattttccttgacatctttagcatcttatgaaatgtatttgggtaaaggagtagtgaggattaaccacctatgattaaagaaaccctgatttagtctatagatacaagaagaggctttttgctttaacaaacatttaattataatgaaaaattttaaaggcctttcactggcaaatagattttaagggaaattaaacatgacaaaggctatttgctttcctttacttcatcacatcagttcccagaacatcctgccattgtagagtaaatcaaaacaaaagccaagcacacacaagggccaaaaaaattggtgaatcctaaatacaagcatgcaggctgctgcagaaattgggaacagcagcggggaggagcctggggataatttccatgtatagcctccctttaaatctgtatttgaatccaaaccaaagcagatgtcagtcagctagccctgcctgatgaagaataatatgtttacataaatttcaatctatctttttacctactgctaaaccaaagttttttactggaattccacatttaaaaattgcaagaaatttatgataagaatatttaactgctggaatagctattaaaattaaacaaataatatgtcttataataagagaaagagagagggagggagagagaaagaaatgagagagaaagagaaacaatgacaggttaaagtaattggaattatttacctcagagaaaataatcaaaacctgatgtaattacatatgcagaaaatatacaacagactgtcagtgaagttgaagcaaattacaagaataattaaaatcagctttgttttctagctattatcttaagaagctataaggaagcgctttattatcaactggttagtgataaacattataaattacctttttaattagtaaagcttctgaagtatttagtaaaacttcaaaaacagaagaatttagtaattcagggaaatacaataaaatcttagtaaaacttcaaaaatagaagaatttagtaattcagggaaatacagtaaaatcttatagattaggctatgtctaagaaaaatgataaccatgatgaagatagtacaaacataattaatgacttcttggatagaatataaatctcgtcccctttagactatggtatgctcatttaatttgatcaatgtgtatagtcacactgaataattcaggctatttagtttggtaaaattagccatacaacttctacttctctattgcgttcttatttctggattacaatgctctttgttaacttctctctttgatgatctcaacactttctattttctgagccattccataactaaacagggtaagagtttccaggactcatttgttttaaatgggaaaggtactcattcccgcaatatgttactttgatgttgcgtaaagcacattgtgagctttggaataatacaaacctgcattcaaatcctaccttttctaggaaagttatgaaacatctcttagctgcttccttaaagtgtcaaatgggagataatttactagataaggtagttgtaagaattaaatgaggtaacatgtgaagcacttactatagagctttccacatagttattaaaaaatgttatttctttccctttgtttgttgtcacaagttcttttagggaaggatgtagagcaaaagatatgcataaacttgtgaaactttaccactgttcagaattcctcagagagagaaactacattcatcttggaaatccatattgcgtactttgaagaactgcagttcttcttgcaaactctttatttctttgaagttaggtcaggagaataatacggcatcattctgtggacaagccatggttattgccaccaaataaaatgtctctgtatcaagaatctggcccttctaaaagtagcatttgtgattagagatcatgtccaggtctatctatacacagtgcccccgccaccccaatatacttttaattgagtttttactcactgagacctacaatatcactggtaaagtatctcagctttcatttgtgctgttgttcggtaaactacaaattttccttgagaaacgagtgacatttattttcaatgtcaatattctacctttggttgtatactgagaaccagaacacaaaaatccccagtaattcatctccagtgtctgataactacctcataaatgatcatggtgtgaagttttgcacgaggattttcaaagaaaagatattcaaacctcttttcaaaagacaattgttgatggttcaacaagaaagaggatgttttggttatcctaccacttttacactccaggaattcaaaaaatgttttaaaagggtgaattttattttatccattttttgccacaatttctaaaacaacaacaaaaaaagagtgagtgatacaaagtagctacacaatctcactattaaagtcaggtaatctccattaattgtaaatattaacttccatgctaattaatttcacccaactgaagtgtaaatatgccctttgcttttgttgacaccctaaggatttagagattctacccattaggatgttgaaaagcagtgtggggtttttgaagaggaacattttcacaccatctggatgaatcaaagggtcatcttagaacacagttgtcaatacaatttctagaatcagtgcagtgaaagtaaagcacccagagaaatttggcaataggcatgtgggaaacagagagtttgctctcagttttttctccaataaaaatattgctaagacatagttccaggatgaaataaaaataatatacactgctagctcagagttatttacatgagctatggataaaggaccacaagatttcaaagcagtctcaggactcttttcttagctagcaaactatatctgagatgatcttgtcctccctctcagaggataagcaggaatttgctgagtagagaagttgtgagaaaggcaatgatgtgggagataggaagaagcaggaaggaaaagcagatatgtaaaggcaagaagcatgcaagtaaaagtcagatttgggggatggtaaagacttcaacatagctagagacagggttatggatgggaagtgcattcatttcccattgcccttacaacaaattaacacaaactgagtggtttaaaacaccacaaataagtcagaagtcctgaattagtcttacagagctaagctaaaatcaggatgtcagtgggattaattgcttctggagatgccaatgggggattcatccctttcttcttccagcttctagaggctttcagcattgcatgccttggcttgcggcttcacaccaatttctacttctgctgtcacattgccttcttctgcctttgaccttcctgcctctctcttaaaaggcccctttataattacatttagggcctgcctggatcatcaaggaaaatccccccatctcaagatccttaaattaaccacatctgcaaagttccttttgacatataaggttacatattcacaggttatggaaattacgacttggatatcttttgaggaccattattcagactaccacaggcagtaatacaacttatgatatttatcatttccgcatgttattcgttacactaggtactttacctgcattatatagccacaatgctctctgtctctgcaagatgagaaatattatgggtgagattcaaaatgtttaaaaacttgtgctcaggggcactgagcaatcagcatgggtcagacacagttctgaagccctcattgctgtacaactctccctctgctgtatgagagagatccacatggtagcctggaagatcatccaggcaaaatgtgcatgcagcagggtgcggtggctcacacctgtaatcccagcactttgggaggctgaggcgggaggatcacctgaagtcaggagttcgagaccagcctggccaacatggcgaaacccagtctctattaaaaatacaaaaattagccgggcatggtgacgtatgcctgtagtcccagctactcgggaggctgaggcaggagaattgcttgaacccaggaggcggaggtggcagtgagttgaaatggcgccactgcacaccagcctgggcaacagagcgagactccgtctcaaaaaaaaaaaaaaagggcatacttgtgtatactgattaaatatcaatgttgagaatagcacatcaaggtaggtcctctgccaggtattttgcattcattattgtacttaatccttattttcaccctctgaggaaggcatttttgtctctgttttacagattaaaattcaaaaggctcaaagaagttaaataacttgcccatgttcacatggcgagtcactctgagaaccaagagccaaactctgtatgcttctagacccccttttccttccatcaagttaggcggagtcttatttaaaaatctaaaataataataaaatttagagatacttaaggattatgaaacccatatgatagtctgtgtaataaattagatattatatttttgaaaatttgtagtgggttaatcttcaatggcagaggtgagggtggccacccctcctcccaaatagggagagtgcaacattatatcaaatgaccaagttaattccttgggaggcacccgatgggctcacttacttgtctcaataattggattgccaaagcaattagagatgtcatgcgggcccctcctaaaaactcaataccaagctggggtcttagcatgagaaagtcttaacatccttgccattcctttgctactagtgccactataacattcccagcagattcaaactgtgattttaaaagatacacaacaaccaaataagttaattatgctcttcacagtttgcttagacatatagaatttaacagccactaaacatgtgaaacactgagtgatgtttcaaaataaagtttggctggaaatattatagttatcatccttcatcattacctggaagatcatattcattttgggttgatatgacacaaatgaatgtattcatgtgaacctgatagattttactgttggttttctgagaaaatattttaaaagaactaaggaaaatcagctacaagttcatgaggtacacatagcttaaaatatctcaaataatgtcctaaagctcatgcagacacacttgtacagctacacagcacataatagtgtaaggacccaccaatccattgttcaagttattctaaggaatacgttttgtttaaaatccagtcccctggtttacaataattcctgtatcaggaaaaaagggtgtgagctcatcagcagagtgaatcacaataactcaaacaggatgattgatgagatagtgaaaaggtgttggtgaatttacacaggccattaacctaataatttattcaactttctctgcaaactcccgtgaatatatccaagaaggcacataaactcatgtctccgaactcttgttaaaagaatattagggaattcacaaagttcacagaattatggggaaaaaaattaataagtcctgagtctcctttatgccctgacactgaagtcaatgttgtcctcttaccaaaaagcaaacacaagcctgactacggcactttgttgcctagttaccctcgtgtcctcacaggcctgggttgcctatctctgtgggaatgaattaaattctgcaaataaactctgacttggacacttcagggtccattggtttactcggactaaactgtgctttgtctataaatggtcctagaatttcattcataattttggaaaggggtagagggaggaaaaacacaaaatacatataaaatctgaaatctgaaatgtgttctatttaaaaacattttgtcttataaaaaacgctacctccatgcaaggaggggggcccattgtgatatgtcagcagagaccagatcacatgcacttcagttacctgcatgccaggttaattcacataggaataggatacgcatatggtttttcatcacagaacaaaactagatgagaatgtatgtggataacactatctggtgggtagggacagggagagagtaagccattatataatcttgaagtttggggcattagggaatattacatgcaatacaatatgttaaaatgcttagcacctatgaattcagcttaattgatgtataaagtatagaaacaaagctcatttgaacataacatttcaatggaaaaaaggatgagcattttttttatcttattggtactagatctttacaaaaagatttaaggttcataaatttcccttaatttgcttcagtttcaaataaaagattatttcattaatttattattgactctcactaatacatataacttactttttagtctgggcccatttgtttacttattcgttgctttcctcattcattggttttaataatgtttatgtgccaatcactgtgctaagtcataaaaattcaaagcaaacaagagggagagtgatctctgccctggtggggtttttgctgaagcagagaagacaggtgattctaaaaataattaatacattacctaaatgagtgttttgaagggagacaggtagcacatctgaaagtctataattcctaacctatttatgtgcaatattgtttagctaaagaaatcaaaggtagttctgaaatatggaacataagcagacaacttttattctgacactttttatttttaaagtgatttcctaagcaaccctaaaatattttaagacaactgcattttttagtcctatgcatattatcaaactgataaaaaataaaattttatatcaaaaatgaaatattgtctaagtgacatatttatatcaccttcattttgcagattttggaaaaatttaggtggctccatggtctttcttgctggttaaatccattaaaaaatatagatgagtaggtcgcgaaaattttctcccattttgtaggttgcctgttcactctgatggtagtttcttttgctgtgcagaagctctttagtttaattagatcctatttgtcaattttggctttggttgccattgcttttggtgttttagacatgaagtccttgcccatgcctatgtcctgaatggtaatgtctaggttttcttctagggtttttacggttttaggtctaatgtttaagtctgtaatccatcttgaattgatttttgtataaggtgtaaggaagggatccagtttcagctttctacatatggctagccagttttcccagcaccatttattaaatagggaatcctttccccattgcttctttttctcaggttcgtcaaagatcagatagttgtagatatgcggcgttatttctgagggctctgttctgttccactgatctatatctctgttttggtaccagtaccatgctgttttggttactgtagccttgtagtatagtttgaagtcaggtagtgtgatgcctccagctttgttcttttggcttatgcaggctcttttttagttccatatacacagcaaaagaaactaccatcagagtgaacaggcaacctacaaaatgggagaaaattgtcgcaacctactcatctgacaaagggctaatatccagaatctacaatgaactcaaacaaatttacaaaaaaaaaacaaacaaccccatcaaaaagtgagtgaaggacatgaacagacacttctcaaaagaagacatttatgcagccaaaaaacacatgaaaaaatgctcaccatcactggccatcagagaaatgcaaatcaaaaccacaatgagataccatctcacaccagttagaatggtgatcattaaaaagtcaggaaacaacaggtgctggagaggatgtggagaaataggaacacttttacactgttggtgggactgtaaactagttcaaccattgtggaagtcagtgtggcgattcctcagggatctagaactagaaataccatttgacccagccatgccattactgggtatatacccaaaggactataaatcatgctgctataaagacacatgcacatgtatgtttattgtggcactattcacaatagcaaagacttggaaccaacccaaatgtccaagaatgatagactggattaagaaaatgtggcacatatacaccatgcaatactatgcagccataaaaaaatgagttcatgtcctttgtagggacatggatgaaattggaaatcatcattctcagtaaactatcacaagaacaaaaaaccaaacaccgcatattctcactcataggtgggaattgaacaatgagaacacatggacacaggaaggggaacatcacacactggggactgttgtggggtggtgggaggggggagggatagctttaggagatatacctaatgctaaatgacaagttaatgggtgcagcacaccagcatggcacatgtatacacatgtaactaacctgcacattgtgcacatgtaccctaaaacttaaactataataataataaaagaaaaaaaataaaaaaaataaaaaatatagatatatatgacaaggttcttaggacccaactacatctgtggctttgagaccatataatcccatgtctttagtttaatctacaccaagtagtattcatttacaatttctgatattcaagatgtttcctagcttttcaaagacccatagatgtcctttcctcagtggtaaaattgtaatagccaccatcaggaaattctgctattgtgctaaggttcctttctttctcttttgaagagcaaaaaataaacagagccagttacagcacaatggctgcccaggcttccccacttaacattcctgaacatatttattgtggaaataaattctgataatattgcaagtattttatttttatcattcatttagaaatatattttgaatgccccattcactctatcaaaactggaaacacttccttttcaattttcccaattacctttatttcttaagatgaagttatttaaatttcacaagtagaagaatattggactaatttatctatgtgtagtttccatcagccacaatttttgtatttgattagcgtctaagcaaaattcttttctgagtttttctaatatgaaggtttacagctcatcacacagaaaaagcaaagcctcttttttggtactagtgtgctgctgtgtagaaagaccagtgttgtcacatcaccagcaggatgggagctgtggcttgcttttctagtagagtgggatgctgtgattatctgcctctactctctcaccaatttcccctttgaataaaaggtaaatgctgatgagcctccaggttgggtggaaattccacctgtagatgtagaataacattgtcctaattaatgttgtatatgtctacagtctgtgctttatctcactataactttcaccaaatgaattaattagctttcattttggttatatacaaccattactcagaaatgcatacttcatggaaattatttccatgttcttaaccatttaaattaggattattgatatgaggtaatattttaaaaataaaatgaccaattgtgtactatacatacagttaatattaggtgtatgcacattcaaaactaatgatacattataatataatgaactatttttctttactgcctctgtccattccctaagtattctgtccgataattaaaaacagacataaactattattaccctaaatgttaattcttgttccatttactgaaaaactcaatgaggtaacattttaaacaatggtttcttctttaagatttttatttacaattaagtgagcccgaattctttcgtaactgtgttgaaaacaaaactctcctcactataagttgaatgctttagctgattaaaataaaagtattttagtattttagctggttaaaataaaagctcatgaaaggctcactgattcatattagtaacttcagttttataatttaactgccattatagttcttataaaaaatttccatcattaaatcacaaactgctccaaatttttattttgagaagcaatatgttcataaatgaagctttggattattagatatatagatagtatattcatctcattgttgaaagttgaaaattttggtcgatagtcacggcttggctgatttcttcatagaattctctatgtatgttctacatgacattgctatgacactaatgtccaaagcctccatttctcttgagaaaaaaaaatcacttcttgtcatgtttcaatcaccctctgagacgaagccacacacagatgaaacaatagctaattctttaaggcaactaggaactcttttgtgccctggcaggatagtgtttgaaacttgtaatatggtatacagttctaatggtaacatttgaaaataagtgaattacagtggctggctggcaagatggccgaataggaacagctccggtctgcagctcccagcgagaccaatgcagaaggcaggtgatttctgcatttctaacggagatacccagctcatctcattgggactggttagacagtgggtacagaccacggcgtgtgagctgaagcagggttgggcatcaactcacctgggaagttcaaggggttggggaactccctcctctagccaagggaagccatgagggactgtgctgtgaggaatggtgcattccggcccagatactacacatttcccacagtctttgcaacctgcagaccaggagattcccttgggttcctacaccaccaggatcctgggttttaagcacacaactgggtggctgtttgggcagacaccgagctagctgcaggatttttttttttttcataccacagtggcacctggaaggccagtgagacagaaccattcacaactgtggaaagggggctgaaaccaaggagccaagtggtctagctcagcggatcccacccctgtggagcccagcaagctaagatccactagtttaaatttcttgttgccagcacagcagtctgaagtggacctgggacacttgagcttggtgaggggaggggtgtctgctattactgaggcttcagtaggcggttttctcctcacagtgtaaacaaagccaccaggaagttcaaactgggctcagctccacaaagccactgtagccagactgccttcctagattcctcctctctgggcagggcacttctgaaagaaaggcagcagccccagtcaggggcttatagataaaattcccatctccctgggacagagcacctgggggaaggggtgcctgtaggcgctgcttcagcagacaaacattcctgcctgctggctctgaagagagcagtggatctcccagcgcagtgcttgagctctgctaagggacacaatgcttcctcaaatgggtccctcacccccgtgcctcctgactgggagatacttcccagcaggggtcgacagacacctcatacaggagagatccagctggcatctggtgggtgcccctctgggaaaaaccttccagaggaaagaacaggcagcaatctttgctgttctacagcctctgctggtgatacccaggcaaagagggtctggagtggacatccagcaaactccagcagacctgcagcagagaggcctgactgttagaaggaaaactaacaaacagaaaggagtagcatcaacgtcaacaaaaaggatgtccagtcagaaaccccatccaagggtcaccaacatcaaagaccaaaggtagataaatccatgaagatggggaggaaccagtgcaaaaagtcttaaaattacaaaaatcagaatgcctcttctccaaaggatcacaactcctcaccagcaagggaacaaaactggatggagaatgaatttgacaaattgacagaagtagacttcaaaatgtgggtaacaacaaatggctccgagctaaagaagcatgttctaacccaatgcagagaagctaagaacactgaaaaaaggtgagaggaattgctaactagaataatcagtttagagaagaatataaacgacctgatggagctgaaaaacccagcacaagaacttcctgaagcatacacaagtatcaatagccaaattgatcaagcagaagaaaggatatcagagattgaagatcaatttaatgaaagaaagggtgaagacaagattagagaaaaaagaatgaaagggaaagaacaaagcctccaagaaatatgggactatgtgaaaaaaacaaacttacgtttgattggtgtacctcaaagtgatgggagaatggaaccaagttggaaaacacccttcaggatattatccagtagaatatccccaacccagcaagacaggccaacattcaaattcaggaaatacagagaacaccacaaagatactcctcgagaagagcaaccccaagacacataatcatcagattcaccaaggtcgaaatggaggaaaaaatgttaaggacagccagagagaaagctcaggttactcacaaagggaagcacatcagactaacagtggatctctctgcagaaaccctacaagacagaaaagagagggggccactcttaaaggaaggaattttcttttttttttttttaaggttaaggaatattaaagagtttattttatgctcatttattccttcttgaaagctcttcttttctttacgtagatttcagtttttgacctatgtcatttcatttctgaccgaaaaatttctttcaacatttatttcaaggcaggtctactggtgacagattcagcctttgtctgagaaagcatttcttctttgcttttgaaggatagtttcactgtatccagaattctagttttatcctttaaacactttaaatatttcacgctaccttcttctttcttgcatggttgccaatgagatttctgatgtaattcttatccttgtccctccttaggtaaatttcttctcttctgtagcttctttcatgttttctggttgtctttagttttctgtgatttgaacataatatgactaggtgtggactttttttttatactcaacaataatttattgtatattttcaaatagctaaaagaggagaattggactgtttctaatacaagacatgataaatgcctgaggtgatggacaccccaattgccccaataagattattatatattgtatgtatcaaaatttcacatgtatcccatagatatatacacttattatgtacccataataattaaaaacaattttttaaaagatcctgtttcttaacatctttgacacttcatttatactctagtttttccttttttttatattatactttaagttttagggtacatgtgcacaatgtgcaggttagttacatatgtatacatgtgccatgctggtgtgctgcacccactaactcgtcatctagcattagctatatctcccattgctatccctcccccctacccccaccccacaatagtccccagagtgtgatattccccttcctgtgtccatgtgttctcattgttcaattcccacctatgagtgagaatatgcggtgtttggttttttgttcttgcgatagtttactgagaatgatgatttccaatttcatccatgtccctacaaaggacatgaactcatcatgttttatggccgcatagtattgcatggtgtatatgtgccacattttcttaatccagtctatcattgatggacatttgggttggttccaagtctttgctattgtgaataatgccacaataaacatacgtgtgcatgtgtctttatagcagcatgatttatagtcctttgggtatatacccagtaatggcatggctgggtcaaatggtatttctagttctagatccctgaggaatcgccacactgacttccacaatggttgaactagtttacagtcccaccaacagtgtgaaagtgttcctatttatccacatcctctccagcacctgttgtttcctgactttttaatgatcaccattctaactggtgtgagatggtatctcattgtggttttgatttgcatttctctgatggccagtgatggtgagcattttttcatgtgttttttggctgcataaatgtcatcttttgagaagtgtctgttcatgtccacccactttttgatggggttgtttgtttttttcttgtaaatttgtttgagttcattgtagattctggatattagccctttgtcagatgagtaggttgtgaaaattttctcccattttgtaggttgcctgttcactctgatggtagtttcttttgctgtgcagaagctctttagtttaattagatcctatttgtcaattttggctttggttgccatggcttttggtgttttagacatgaagtccttgcccatgcctatgtcctgaatggtaaagcctaggttttctcctagggtttttatggttttaggtctaacatttaagtctttaatccatcttgaattgatttttgtataaggtgtaaggaagggatccagtttcagctttctacatatggctagccagttttcccagcaccatttattaaatagggaatcctctccccattgcttgtttttctcaggtttgacaaagatcagatagttgtagatatgcagcattatttctgagggctctgttctgttccattgatctatatgtctgttttggtaccagtaccatgctgttttcattactgtagccttgtagtatagtttgaagtcaagtagtgtgatgcctccagctttgttcttttggcttaggattgacttggtgatgcgggctcttttatggttccatatgagctttaaagtagttttttttccaattctgtgaagaaagtcattggtagcttgatggggatggcactgaatctttaaattaccttgggcagtatggccattttcacgatattgattcttcctacccatgagcatggaatattcttccatttgtttgtatcctcttttatttccttgagcagtggtttgtagttctccttgaagaggtccttcacatcccttgttaagttggattcctaggtattttattctctttgaagcaattgtgaatggtagttcactcatgatttggctctctgtttgtctgttgttggtgtataagaacgcttgtgatttttgtacattgattttgtatcctgagaatttgctgaagttgcttatcagcttaaggagattttgggctgagacaatggggttttctagatatacaatcatgtcgtctgcaaacagggacaatttgacttcctcttttcctaattgaataccctttatttccttctcctgcctaattgctctggtcagaacttccaacactatgttgaataggaggggtgagagaaggcatccctgtcttgtgccagttttcaaagggaatgcttccagtttttgcccattcagtatgatattggctgtgggtttgtcatagatagctcttattattttgaaatacatcccatcaatacctaatttattgagagtttttagcatgaagcattgttgaattttgtcaaaggccttttctgcatctattgagataatcatgtggtttttgtctttggttctgtttatatgctggattacatttattgatttgcgtatattgaaccagccttgcatcccagggatgaggcccacttgatcatggtggataagctttttgatgtgctgctggatttggtttgccagtattttattgaggatttttgcatcaatgttcatcaaggatattggtctaaaattctcttttttggttgtgtctctgcctggctttggtatcaggatgatgctggcctcatcaaatgagttagggaggattccctctttttctattgattggaatagtttcagaaggaatggtaccagctcctccttgtacctctggtagaattcggctgtgaatccatctggtcctggactctttttggttggtaagctattaattattgcctcaatttcagagcctgttattggtctattcagagattcaacttcttcctggtttagtcttgggagagtgtgtgtgtccaggaatttatccatttcttctagattttctagtttatttgcgtagaggtgtttgtagtattctctgatggtagtttgtatttctgtcggattggtggtgatatcccctttatcattttttattgcgtctatttgattcttctctctttttttctttattagtcttgctagcggtttatcaattttgttgatcctttcaaaaaaccagctcctggattcattaattttttgaagggttttttgtgtcactatttccttcagttctgctctgattttagttatttcttgccttctgctagcttttgaatgtgtttgctcttgcttttctagttcttttaattgtgatgttagggtgtccattttagatctttcctgctttctcttgtgggcatttagtgctataaatttccctctacacactgctttgaatgcgtcccagagattctggtatgctgtgtctttgttctcattggtttcaaagaacatcttaatttctgccttcatttcgttatgtacccagtagtcattcaggagcaggttgttcagtttccatgtagttgagcggttttgaatgagattcttaatcctgagttctagtttgattgcactgtggtctgagagatagtttgttataatttctgttttacatttgctgaggagagctttacttccaagtatgtggtcaattttggaataggtgtggtgtggtgctgaaaaaaatgtatattctgttgatttggggtggagagttctgtagatgtctattaggtctgcttggtgcagagctgagttcaattccagggtatccttgttgactttgtgtctcgttgctctgtctaatgttgacagtggggtgttaaagtctcccattattaatgtgtgggagtctaagtctctttgtaggtctctcaggacttgctttatgcatctgggtgctcctgtattgggtgcatatatatttaggatagttagctcttcttgttgaattgatccctttaccattatgtaatggccttctttgtctcttttgatctttgttggtttaaagtctgttttatcagagactaggattgcaacccctgcctttttttgttttccatttgcttggtagatcttcctccatccttttattttgagcctatgtgtgtctctgcacgtgagatggttttcctgattacagcacactgatgggtcttgactctgtatccaatttgccagtctgtgtcttttaattggagcatttagtccatttacatttaaagttaatattgttatgtgtgaatttggtcctgtcattacgatgttagctggctattttgctcgttaatcgatgcagtttcttcctagtctcgatggtctttacattttggcatgattttgcagtggctggtaccatttgttcctctccatgtttagtgcttccttcaggagctcttttagggcatgcctggtggtgacaaaatctctcagcatttgcttgtctgtaaaggattttatttctccttcacttatgaagcttagtttggctggatatgaaattctgggttgaaaattcttttctttaagaatgttgaatattggcccccactctcttctggcttgtagagtttctgctgagagatccgctgttagtctgatgggcttccctttgagggtaacccgacctttctctctggctgcccttaacattttttccttcatttcaactttggtgaatctgacaattatgtgtcttggagttgctcttctcgaggagtatctttttggcattctctgtatttcctgaatctgaattttggcctgccttgctacattggggaagttctcctggataatatcctgcagagtgttttccaacttggtcccattctccccgtcactttcaggtacaccaatcagacatagatttggtcttttcacatagtcccatatttcttggagggtttgcccgtttctttttattcttttttctctaaacttcccttctcacttcatttcattcatttcatcttccatcgctgataccttttcttccagttgattgcatcagctcctgaggcttctgcattcttcatgtagttctcgagccttggttttcagctccatcagctcctttaagcacttctctgtattggttattctagttatacattcttctcaatttttttcaaagttttcaacttctttacctttggtttgaatgtcctccagtacctcagcgtaatttgattgtctgaagccttcttctctcagctcatcaaagtcattctccatccagctctgttccgttgctggtgaggaactgcgttcctttggacgaggagaggcactctgctttttagagtttccagtttttctgctctgttttttccccatttttgtggttttatctactattggtctttgatgatggtgatgtacagatgggtttttggtgtggatgtcctttctgtttgttagttttccttctaacagacaggaccctcagctgcaggtctgttggagtacccagccgtgtgaggtgtcagtctgcccctgctgggaggtgcctcccagttaggctgctcaggggtcaggggtcagggacccatctgaggaggcagtctgcccgttctcagatctccagctgcatgctgggagaaccactgctctcttcaaagctgtcagacaaggacatttaagtctgcagaggtcactgctgtctttttgtttgtctgtgccctgcccccagaggtggagcctacagaggcaggcaggcctccttgagctgtggtgggctccacccagtttgagcttcctggctgctttgtttacgtaagcaagcctgggcaatggtgggcgcccctcccccagcctcgctgccaccttgcagtttgatctcagactgctgtgctagcaatcagcgagactctgttggcgtaggaccctccaagccaggtgcaggatataatctcctggtgccgttttttaaggccgtcagaaaagcgcagtattcaggtgggagtgacccaattttcccggtgctgtctgtcacccctttctttgactaggaaagggaactccctgaccccttgtgcttcccgagtgaggcaatgcctcaccctgcttcggctcgcgcatggtgcatgcacccactgacctgcgcccactgtctggcactccctagtgagatgaacccagtacctcagatggaaatgcagaaatcacccgtcttctgtgacgctctcactgggagttgtagaccagagctgttcctattcggccatcttggctcctcccccaggaaaagaattttcaacccagaatttcatatccagccaaactaagcttcaaacgtgaaggagaaataaaatcctttacagacaacccaatcctgagagattttgtcaccaccaggcctgccttacaagagctcctgaagaaagcactaaatttggaaaggaacaaccggtaacagccactgcaaaaacataccaaactgtaaagaccatcaacactatgaagaaactgcatcaactaatgggcaaaataaccagctagcatcataatgacaggatcaaattcacacataacaatattaactttaaatgtaaatgggataaatgccccaattaaaagacacagactggcaaattggataaagaggcaagatccattgttgtgctgtattcaggagaccaatctcacgtgcaacaacacacataggctcaaaacaaaggggtggaggaatatttaccaagcaaatggaaagcaaataaaaaagcagaggttgccatcctaatttctgataaaacagactttaaaccaacaaagatcaaaaaaagacaaagaagggcattacataatggtaaagggatcaatgcaacaagaagagctaactatcctaaatatatttgtacccaatacaggagtactcagattcataaagcaagtttgtagagaactacaaagagacttttagactcccacacaataatattgggagactttaacaccccactgtcaatattagacacatcattgagacagaaaattaacaaggatattcaggacttgatctcagctctggaccaagcagacttaataggcatctacaggactctccacccaaaatcaacagaatatacattcttcttagcaccttgtcacactgattctaaaattgaccacataattggaagtaaaacactcctcagcaaatgcaaaagaacagaaatcataacaaacagtctctcagaccacagtgcaaattagaactcaggattaagaaactcactcaaaaccacacaactacatggaaactgaataacctgctcctgaatgactactgggtaaataatgaaattaaggtagaaataaataagttctttgaaaccagtgagaacaaagatacaatgtaccagaatctctaggacacagctaaagtactgtttacagggaaatttataggaccaaatgcccacaggagaaagcaggaatgatctaaaatcgacaccctaacgtcacaattaaaagaactaaagaagcaagagcaaacaaattcaaaagctaacagaagacaagaaacaactaagaccagagcagaattgaaggagatacagacatgaaaaacccttcaaaaaatcaatgaatccaggagctgtttttttttaaaaaagattaacaaaatagatagaccactagccagactaataaagaagaaaagagagaagaatcaaatagacacaataaaaaatgataaaggggatatcaccactgatcccgcagaaatacaaattactatcagagtatactatgaacagctctatgcaaataaactagaaaatctagaagaaatggataaattcctggacacatacaccctttcaagactaaatcaggaagaaattgaatccctaaatagaccaatacaaagttctgaattgaggcagtaattaatagcttaccaatcataaaaggcccaggaccagacagattcacaactgaattctaccagaggtacaaagaggagctggtaccattccttctgaaactactccaatcaatagaaaaagagggagtcctccctaactcattttatgaagccagtatcatcctgaagccaaagcctggcagagacacaacaacgaaaaaatttcaggccgatatccctgatgaatatctatgcaaaaatcttcaataaaatactggcaaacagaatccagcagcacatcaaaaagcttacgcaccatgatcaggtcagcttcatccctgggatacaaggctggttcaacatatgcaaatcattaaacataacccatcacataaacagaaccaatgacaaaaacctcatgattatctcaatagatgcagaaaaggcctttgataaaattcaacaccccttcatgctaaaaactctcaatacactaggtattgatgaaacatatctcaaaatagtaagagctatttatgacaaacccacagccaatatcataccaaatgggcaaaagctggacgcattctctttgaaaacaggcacaagacaaggatgtcctctctcaccactcctattcaacacagtattggaagttctggccagggcaatcaggcaagagaacgaaataaaggatattcagatagaaagagaggaagtcaaattgtctctgtttgcagatgacatgatcatatatttagaaaaccccattgtctcaggcccaaatctccttaagctgataagcaacttcagcaaagtctcaggatacaaaatcaatgtgtgaaaatcacaaacattcctatacatcagtaatagacaaacagagagccaaatcatgagcaaactcccatttacaattgctacaaagagaataaaatacctaggaatacaacttacaaaggatgtgaaggacctcttcaaggagaactacaaaccactgctcaaggaaataagagaggacaaaaacaaatggaaaaacattccatgctcactgataaaaagaatcagtatcatgaaaatgcccatactacccaaagtaatttatagattcaatgctatccccatcaagctaccactgactttcttcacagaattagaaaaaagctactttaaatttcatacagaaccaaaaaagagcccacattgccaagacaatcctaagcaaaaagaacaaagctggaggcatcatgctacctgacttcaaactatactgcaaggctacagtaaccaaaacagcatggtactggtaccaaaacagatatatagacaaatggaacagaatgtagacctcagaaataatgccacacatctaaaaacatctgatctttgacaaacctgacaaaaacaagcaatggggaaaggattccctatttaataaatggtgttggggaaactggctaaccatatgcaggaaactgaaactggaccccttccttacaacttatacaaaaattaactcaagatggattaaagacttaaacataagacctaaaaccataaaaaccctagaagaaaacctaggcaatactattatggacataggcctggccaaagacttcatgactaaaacaccaaaagcaatggccacagaagccaaaattgacaaatggaatctaatcaaagagcttcttcacagctgaagaaactatcatcagagtgaacaggcaaactacagaatagggaacatttttgccatctatccatctgacaaaggtctaacatctagaatctacaaggaacttacacaaatttataagaaaaaaacaaagaaacccatcaaaaagtgggcgaaggatatgaacagacacttctcaaaagaagacttttatgcggccaacaaacatataaacaaagctcattaccactggtcattagacaaatgcaaatcaaaaccacaatgagataccatctcatgccagttagaatggtgataattaaaatgtctggaaacaacagatgctggagaggacgtggagaaaaaggaatgcttttacactgttggtgggagtgtaaattagttcaaccattgtggaagatagtgtggcaattcctcaaggatctagaaccagatacaccatttgacccagcaatcccattaccggatatatacccaaagaaatataaatcattctactgtaaagacacatgcacatgtatgtttattgcagaactgtttacagtgcaaagacttggaaccaacccaaacgcccatcaacgatagactggattaagaaaatgtggcatacataccatggaatactatgcagccataaaaaggatgagttcatgtcctttgcagggacatggatgaagctggaaaccatcattctcagcaagctaacacaggaacagaaaaccaaacaccgcatgttctcactcataagtgggatttgaacaatgagaacacatggacacagggaggggaacatcacacaccagggcctgtcggtgggtggagactaggggagggatagcattaggagaaatacctaatgtagatgatgggttgattggtgtggcaaaccaccaaggtatgtttatacctatgtagcaaacctgcacattctacacatgtatcccagaaattaaagtataataaaaaaaaataagttaattataaactaaaggatagtcatcaagagttcataagccttttaaagtattctctcctaaataagcatattttatactttatcaaatgatgttgtctttcctaggtatttctacctgcagaaaacaaactaataaacaaaaccagaccaaaactgtgggaagaagaaagcaggctgaatacaaaacatgttgcataggaaattccaagctttatctctaattataaaatgtctagaatactgcaggcagcaaaaagcaactcaacgaatataaagagataactacagatgtgaagtcattatcaaagactaaggagaagaaataaaaaaaaggttcaatcatgtagcccattacaaagatcaatggcatcaataaacactgccttatgttccaagttgcatatacatcagctttcccagcagctaggagccttggcagctccgagagaccagggaccagacaatatatcttttgatttatcatgattatttatatggtgttatagattgcaaatatatattaaatttaattaaatatctgaaaaaagatataaaatcacaaaaactaaaaccttacaaaagcttcaaacttctagcaacaatggcacttacataggagtcttagccaaggagcaaggaaagaaagtaagtggggtcaatgtctcttaggtgtgcacacatctctgtggttaatttcctcatacctttcttcaaagcccaagataagtaagttataaaatttgtttagaacaattgagcccattctcctttccattagcattagatggctaaactataccaatagcttattgtaattgaaagactaagccttctacacaaaatgtatatattggaataaccataaatgtaatatatatatgaaagtcgtgactgcatactataagatagcaacacatgtgctttgtactaagcactttcatatatctcacttcatcctcaactctgattgaaacttatccaataagacataaaaaattgaaaagtgaagttcagtgactcaatccaaggtcactcagtcagtaagtggtagagaggattcaaagccaggcagtctgactttagagcctatgctcttaaccactaccatatccactctctttcatactacaggttggaggaaccatggaaagaaagtagtaacacaaagaagcaaaatcaattataaggagggataaagggaaggaagaaaaggcttaacaaagaaaccaaaagggaaaggagaagcaaggaagggaagaaaggaaagaaagacaagatataggtactaataaaagaaggcagttgcatgaagttctgtgtccttgctgtatgattttctcagtgaaattgtaggaaaatgagaaatcttcatctcctctcagcataaaacattaagtgccatatcaaaatctcataaaagaaaataccaatatatgtatgagtcacacttccacttctactccccaaaattgcctgatttcttcattgtaagtaagatattgggtctcccttgaatgaacccatcgcagcattttctatttcagttcataatacagaaaatcgctgcctatattaaacaccttttcccaatgaggctggcaggctgcactgagaatcagaggcaccaacccccaaacaagttttcactgagactctgctcaaatgtctgtcataatgtgaatgatgaaggaagacgggaagcagcagtagcaggacaatctgtcaaaaaaaaagcatagccagccacagggatcagtgtttttatgctaactagatttccccgcaaatttaagtggaagagagacagcagagggtttattagcatatatgtggaggggagggaggggctgtcaatgagctctggatgatcatacagtttcttcctgttctatgattccgtatatctataatttcaaagcacaatgatatatttgcaaagggaagtcaagaggcccaagttctgggctctgctctcagtcttaagcaacctgtctaatttttctgggcctaggtttccgtatctttaaaatacagtgtcctttttagcttttataatctatgactttttgatgacaactacctttgatgatcaccattttgtacataaaagccagcacgtgcacaagtatgcaaacacatacacacacaaacatgagctctaatttgatattattatgactctctacctccaggtagaactatagctattttattcaagatcagtgtttatgtaacctaaaaatttatttggatgacacatttaatatcttactaggaaacctattccaacacctatcaacagaaacttaaaggaattttcccacatatataaacaattgtttttgaattggtttttaaatcctacattaaggcaaataaaagtcttgagttcttctattggctcaggtatataatttcatgcccacttatatttgatgaaactaaagtctctacacagaataaattagaaactagagatatttagatgatgaaagtaaaactacatcaatcaggattatcaatgaagatgctaagtaaatgaaaataaagatcagtaaccaacacagcaagtaatcacagttgtgaaatttgagaagcaacaatatacaaatgttaggatgtatttatctttacatgcagccttctaggtcatctgcaataaggtatttgaaggtacatatgcctggaattcagtcatgaaaaaataaaaagagtaatatctgaacaaatatttctcctatttcaatactcagctccagccacacctcctctccaaagtttttcctcattcagtttctccattcctcttcagtgccttctgtccccagccctgtagaactgtgtctgtcttgcacatagaaaactgtattgctcttatttttttattttgatgctggtctcccattagctagtgttgagtttttgaggacagtgaatatgtattatttgacttgcacaatgcctagcactctgtaaatatcgagataaataactaatttatgtaaatataatactggattcctatctgtaacatgctgttaatgtagagtatattgaaataagatttgggtataggtacttatgaccaaagccatttttcatttgaagaaaatagaagttatatattcctgtctctagattaacaacatagcattacaactgactacagtaatgttaatggaacaaaaagcttaacatctgatatatataccaaaggtctatagtcccctaaaattgtatagaacatgtttgggaaagtatgactattattctggaaagatagattctctaaatcttctgctttgtagtttattgattctggatgctctatgtttaagtgtgataaatggcaagaaaatactgatcctcagtcaaacccaaggaacagcaaggtacccgaaattgaggtttaaagaacactttttaaaatggtgggaatttaaagcctcctgaatatataacttaagttttgagcattttgagctattttgattaatctcactcctgtttcttcactaaaacccttcctgagtatgattaaaaacagtgaaataaatagtgtgctaaactttgagccttcttgattttgttctgagttttttgttttgttttgtttcttgcatttgatctgctgacttcatatgctaagagattactattctgcaagcagtgactgaaaccaaaataatgaaaagtgaaacaacatcttcagagttaaataataacatccccataaggattatttataaattacaaaatcttactcttttccttttcagtgttagcactgttattataaaattgtctatccatatttataaagatataaatgaaagtaatatctccagaaaatgtaatctctacttttaccttgtctcctggggaagagaagatgaaataaacttaaaagctgctaaaagtatttctacataaagctcttttatgggatggaactgagagttgtttaaaaaatcataaaagttagaatatccccataatcatgtacaagtttaccattaaaatacaataaaaagacagctcatactgccaatctcttgttgccctataacattttgagaaaaaattaaaaggcagtattgtcactcatacgagagataccgtatgaaagcatcataacatgaaaatcttcctcatttttttaaaaataaaataaatcccaaatcacagttattcattgttttaaaattctgaatagttatattaatttcaacctttatgtatatattcagaaaaatgatatccataccattctttctagcttcttcaggaaactagaaacatcaatgaaattagaagttctatctatcttttttggcattgtcatatgtgtgtgtgtgtgtgtgtgtgtgtgtgtgtgtctgtattcaataaacatgttatttctccattctgtatgatacagtaatggtggatacatgatataatgtaattggcaaaacccaaaacacactggagattttcctgagaactaagttttaagctgttggcaccagagaacactgttggcagctgtctgtgatctttccacttcccagtttcttgcattctagtagcaacttctctaatcacctaactccaagttctcagaatgaccatgtaaccttttaattacctgtattacataatatcttgtgtgaactacctagaatagcatatatttccctgatgaatctggtcatatgtatttacaatctttcccatcttagatgtcactaaaggggagaaaagtacaaaaccctaatggtagtaaggaactgaaagagagtcatgagaatacaaaatatgtcaacagatgtatagatgacaaagcagataaagaagagatagcacatgaaatagagtcaaccacaggttagattatctagaagggatataaatatgacagactgagagagagaaattgcctttccagaaaggctaagaattccaaaacaccacatgcaatgaagacaggaaagggtacaggagtgacatggggaactgacaattacaagtatctatgggtagaaatagccactatccaaccctgcaggaaagaggacacccaggagacaggcctctccagcttagagaaatatttgaggattctttataacttcactaaaataaaacctttctaaatcaaaataatagctccagacaaaagacttccatcatctggcatgttctgatcccccccaggaaaactgttaattcatagccccatgactccaaagcaaagtgcaagtcagagcccaatcagcttttcattccttaaacttgaataaaattataatcatagctcatcaggcatctaaagaaagcttgctttgaaaaaagacagtccaagatacacaaataaagataaaataaccccaagtgaagataatttggagaagagaagaaaattcataaatactctaataattattctatgagagatttaagaaaatcttgatttccatcacaaagttctctctctcttgctctatgtttctccatcccccagtagatatgcccacactactttgataaaattcttttaaatttgaagaagttactctaaaaagggaatttttaagttaattcagttatttgatttatcctcttccatctatttagaattacagcagagctttgtaaaagccaacattttggttataaagacacctttttctatctgttcccatgtgtggagactaaagcaactccatcttcattgtcagtccaccatactgacatctgatttaccccagttccaggaatgcctctaagatttatactttacctactgttaccataaattctaccctttgttcaaaacagcctcaaccataaatccttcccttaggcagatttacatagcatgcttgcctttccctgaggagttgatttcaactgtcctacatgttccttcactacagcaaataattcctaggtctggggctaacactgcagtgaaccaccatctcctcttgcagccacctgggacctggctattaaatgttttttgttttttcatttttcctgagaagctggatatgtcagcctcttcagcctctcagcttccttgaactttgggggtaggtttgcatagatctattcactgcagaacaccatgtaatcttagaatttggtaattggtatctcgatagatgcagaaaagaccttcgaaaaaattcaacatcctttcatgataaaactctcaataaactagatattgatggaacatttcccaaagtaataagagctacttctgacaaacccacagccaatatcatactgaatggccaaaagcgagaagcattccctttgaaaactggcccaagacaaggatgccctctctctccactcctattcaacatagtattggatgttctggccagggcaatcaggcaagagaaagaaataaagcgtattcaaataggaaaagagaaagtcaaattgtctctgtttgcagacaacttgatcctatatttagaaaaccccattgtctcagccccaaatctccttaagctgataagcaacttcagcaaagtctcaggatacaaaatcagtgtgtgaaaatcacaagcatttctttacactaacaatagacaagcagagagccaaatcatgaatgaactcccattcacaattgttacaaagagaataaaacacctaggaatacagctaacaagggacatgaaggacctcttcaaggagaactacaaaccactgctcaaggaaataagagaggacacaaacaaatggaaaaacatcccatgctcatggataggaagaatcaatatcatgaaaatggccatacagcccaaagtagtttatagattaagtgctattctcatcaaactaccattgactttcttcacagaattagaaaaaaactactctaaaattcatatggagccataaaagagcccgtatagccaaaacaattctaagcaaaaagaataaagctggaggcatcacactacctgacttcaaactatactgcaaggctacagtaaccaaaacatggtacaggtatcaaaacagacacatataccaatggaacagaatagagacctcagatataagaccatctgatcttcaacaaacttgacaaaaacaagcaatggggaaaggattccctgtttaataaatgatgctgggaaaactggctagctatatgcagaagactgaaagtggaccccttccttacaccttatacaaaaatcaactcaagatggattaaagacttaaatgtaaaacccaaaaccataaaaaccctggaagaaaacctaggcaatcccattcacgacataggcatgggcaaagattttatgatggaatcaccaaaagcaatcacaacaaaagctaaaattgacaaatgggatctaattaaagagcttctgcacagcaaaagaaactgtcatcagagtgaacaggcaatctacagaatgggagaacatttttgcaatctacccatctgacaaagggctaccatccataatttacaaggaacttaaccatatttacaagaaaaacacaagaaaacccattaaaaagtgggcaaaaacatgaacagacacttctcaaaagaagacattcatgtgggcaacaaacatatgaaaaaaaagcacaacatcactgatcattaaagaaatgcaaatcaaaaccacaatgagataccatctcacaccagtcagaatggcgcttattaaaaagaagtcatgaaacaacagatgctagagaggctgtggagaaagaggaacactttttcattgttggtgggaatgtaaattagttcaaccattgtggaagacagtgtggcaactcctcaaggatctagaaccagaaataccatttgacccagcaatcccattactggataaatacctagaggaatataaataattctattataaagacacgtgcatatgtatgtttattgcagcattatttacaatagcaaagacatagaaccaacccaaatgcccatcaatgatagactggataaagaaaatgtggtacatatacaccatagaatactatacagccacaaataggaatgagttcatgtcctttgcagggacatggatgaagctggaagccatcattcacagcaaactaacacaggatcagaaaagcaaacagaaatccatcttactcataagtgggagttgaacaatgggaacacatggacacagggaggggaacaacacacaccagggcctgttgggtcatgggggcacgaggggagggagagcatcaagacaaatagctaatgcatgcagggcttaaaacccaggtgatgggttgataggtgcagcaaatcatcgtgacacacatatactgtgtaagaaacctgcatgttctgtatatgtatcccaaaacttaaagaagaaagaaagaaagaaagaagaaagaaagaaagaaagaaagaaagaaagaaagaaagaaagaaagaaagaaagaaagaaggaaagaaagaaagaaaaagagaaagaaaaagaaagaaagaatttggtaattggggagaaaggaagaacctcaatacaggaatatatttatgtaaacattaggatccactcttaggtataaagtgattctttcttaactttataaatatttattgagcaaatgctttgtctaattgtgtcaagtacagagaggttggaaaaggtgtgggaagtagcatcaagaaggatgtttgtccatttaacagagaaagattagtaaaatatgaaaccagctttgcaaagattataacaatgagagaaggctagcatggctgactccatcttgcttctagcctcagagggtggctttccttgcttgttcctgggtgtaggccaaccttgccaagggagaaatttagtttatagtttgaaagagatggagattgagaatgagatcgaaacaatgctaaaatggttgttatgaaagctcccttgaaagctatctggaagagtaaaaatgctatatgtgaggcacttagcacaaagtctaaaatatttaagtgctaaataagtaagtataactgattttaatagattatttttgatggataaagaggtaggtaagtgagatttgcatggaggtgatggctggcataatttggaacaattaagcctgagaatctagatagtaataaaaagattgagggtttacagaagatactgcctttgaggagcatggattttgacagatgacagtgatacaggtcaaaatgcatgtttactttaggggtaggatggagtaggggtcagccatagattggcccgaggagatgtgcccatgacacaattgtatacattatgcatcttttgaacacaaaagtcttcctggaactatgatacctaaatgttcactatagttatctgaggacaaattgattttaagtaattttttctctttgcatctttctttaaaatcttttaaataataatcacatataattttcataatcagataaaaataataaatctatttccattttttaaaagtttttatccataaaagttaatacttacggagggtttactgtgtaccaaagaatgctcgaaataatttaacaatatttattcattttatatttgaaacaaaactataaggtaagttttattgtgcatattttatgaatgaggaaaatgagaacaaagaataggttaaatacattgcttaaggtcatatggctagtaaggagaacacccagtatttgaaggtgtctagcatcttatgcctttttgtataactacatctcatactcagagctctcgttgtgctgttttcaattagaaaaaaatccacacagcattaatgataggtgcaggcagcactactttgcaatcttcttattttgcacccttccacttataaaatgtaatattttctgattaaaaacttcaagcttgttcatttgactgacactatcagcataaagccacatgaacagctagaaatatgccattcaaaaactgttgagatgcggtctcctaaacaagttgcatgtgaaatcaagtccctcttgtattatttctccatctcctcttagattaaatcaatggatacctcatcacctttcctcaaagggccatttcaaaacccttcagttatattggcatctctgctcccagtataaatgtcaggccatatcggggttagataatgaaatgtgaagccatctatttgcttgatttttcaagggcatttggtgagaactgctgttctatacaccttatccatcaccctattactgccttgactgcaaaagagtaggaactgcaagtaattcttaattcttttgcctctaggcaaagcctatgctgtaatgtaggacagaaaagaaatacaatagtgaataattcctaacaaaccttcaatacacacattgcattgctattcttgggtctttttggtttccttttgtgctcaactcaaaaggattcagaaaagcagattttgagtataagccttttcttccaagaagctcttaattctgctattaagaaatcggatatgcaagatagaatctatgtttaatcagattccttagtagctaggctattgcaaatatagtgcaagtgtgtgtgtcgtgtgtgtgtgtgtgtgtgtgtgtttgtgcacgcatgcatcagggctatgatctattatttattttatgtataaaatttatgttttacatgcacattctatattacatcttattgtgattatttgtgtgagtaggttacatgaccttaaactagttaccaatttattatcattattattattatactctaagttttagggtacatgtgtacaatgtgcaggttagttacatatgtatacatgtgccatgctggtatgctgtacccattaactcatcatttagcattaggtatatctcctaatgctatccctccccgctcccccgaccccacaacagtccccagagtgtgatgttccccttcctgtgtccatgtgttctcattgttcaattcccacctatgagtgagaatatgcgtgtttgcttttttgtccttgcgatagcttgctcagaatgatggtttcgtttcatccatgtccctacaaaggacatgaactcatcatgttttatggctgcgtagtattccatggtgtatatgtgccacattttcttaatccagtctatcgttgttggacatttacattggttccaagtctttgctattgtgaatagtgcagctataaacatacgtgtgcgtgtgtctttatagcagcatgatttataatcctttgggtatatacccagtaatgggatggcagggtcaaatggtatttctagttctagatccctgaggaatcaccacactgacttccacaatggttgaactagtttatagtcccaccaacagtgtaaaagtgttcctatttctccacatcctctccagcacctgttgtttcctgactttttaatgatcgccattctaactggtgtgagatggtatctcattgtggttttgatttgcatttctctgacggccagtgatgatgagcattttttcatgtgttttttggctgcataaatgtcttcttttgagaagtgtctgttcatatccttcgcccactttttgatggggttgtttgtttttttcttgtaaatttgtttgagttcattgtagattctaccaatttttttaaatactgtatttccctatacacaatatatttttgcttgatagtatttagtacatggagatgtttttgaacaatcttttgataagatagtagactttttacaaccaactcagttcattgcaacaaggtacactattgacctagaaagtgaaatgaaataatcaatttggggtctagaattacttaattcaactaatcttatcattatcaactctgttgcattttgtagtgtgcagctccttcctaaagcaaattatcatcatcatcatcatcatcatcatcatcatcatctcaggaaaatgaccaagaaaatctgaactgaaacaacagtttttctctttgatgcttttattagatgagtcatctcattcgtaagcattaccctggcttagtctacataatttaaattccttcttttaactaatctcatttgtttccatatatgccgatgtgcattgttttctcctgagacatagtgaaaaggaaaactgttgtgcttttatctattcatatgttttttctataatccagcaggaagctcaatacagcattttactgtcacacaattatgtggtcatctgtcaccatctataagtttttcagagaaactgctctacttctacttctctgaaatttctcacactacttcaatgattattaacaatacaataataaaatacgaaagaaagttcaaaaacaagcaatagaaagatagcatctctgtcctctctggacacagctaaattttctcctctgatgtttgatatattcattcatatatgtctacatttcacttattcattttcctcaagtctcctaaacctagaaaatatcctgagcagttctatatctttcattgttaatcccagtaatttgtcctctcccctaaagtttggcatgtgatctgtaatgtaaattgatatggtagatgagaacagtaggaagaaagattggactggcccagacacacctttgcaaatataaactagaactgaaagagatagaggaaagctcagtctatgttcttgaatatcaggaaggaagatgaattaaagggagtttccctttaatttccttataaattgctctatgtctcaaaataataaatgaactgttacctataaatgtaagaacatgccccaaatttagaaattctaattgagtttaagaaaagaaaggaaaattataataccactgtctttttattttaaaaaattgtgctaaaaacattaaacacaaaactactttcttaacaaatgcatatgtgtacaatacattattgttgactataggtacaatgttgtataacagatccctagaacttattcatctttcttgactgaaactttacgcccattgtttagtaactccccatttctctctaccttctctctacctccacccactggtaaccacaatccaactctttgattctatgaatttgactattttagataactcatataagtggaatcatgcaatatgtgtctttctatgactcatgtatttcacttagcacaatgtctttaagtttcatccatgttgttgtcacatacggcaatagttcctgcttttttaaggctgaataatagtccactatttatataccatattttctcatctattcatctgtcaatagacacttaagttgtttctaaatcttaactattgtgaataatcctacaatgaatataggagtgctaatacatctttgagatcctgatttcaattcttttgaataaacaccccaaagtgggattgctggatcatgtaattgcatttttaaatgtttagaggaacttcatttgtttcccacaaaagctgcaccatattgcatttccaccaacagtgtgcaagggttccaatttctgtacatcctcgtcaacacttgctattttctgttttttttaacagtagccattctactatagtaggtgttaagtgatatttcattatagttttaattcacatttcctggatgattagtgacactgagtatttcttaaaatatctgttggccatttgtatgtcttctttgaagaaatgtctatccaagtccatagcccatgtttaaatcaggttatttatttatttatttatttttctctctcttttattttaactaataacctgaaggggtttattttagatattttggatactaaccctttatcagatatacggtttgcaaatattccccccattctgtaagtgtccttttcactctgttgattcatatcattattttattaattattattattactattatttgcaatagggtctggatctgtcactcaggctggagtacagtggcccaatttcagctcactgcaacctctggcacctcccaggtgcaagcaatcctcctacctcagcctcccaagtggctggtactacaggtgtgagcctaccatatccagctaattttttctttaattttttgtagagacaaggtttcactatgttgcccaggctggcctcgaactcctgagctcaaacaattcacccacaagctttttagtttgatgtattcttatttgtttacttttgtttttgttgcctgtgcttttgatgtcatatccatgaaaccattgccaagaccaatgtcatgaaggttttcttctagtagttttatagtcttggtctatgtttaatctttaagccatttcaagttgatttttgcatatgatgtaagacaagcatccagtttcattccttaatatggatatccagttttccaagtaccatttgttgaagagactctccaatctctatgtgtattcttgacacctttatcaaacgtcagttgactgttgctatagactgaatgttggtgtcacccaaaatccatatgttgaatctttgtctccctaaatctatatgttgaatggcattaggagacggggacttacagagatgattaggtcataaaagtggagacttcatgaataaaagacatctgagaggaatgcttcacctttccaccatgtgagacacagtgagaaggcactaactatgaggaagcagtccatcagtacctgtgcctcaattttggaattccaaacttctggaactgtgagaaatatatttctgttgttataagctacccagtttatggtattttattatagtagcccgaatagaataaaacaaccaagtatgcatagatttatttctggattctcttatgttccattggtctatatgtctgttttaatgccagtatcatattgttttgatctctgtggttttgcaacatatctagagatcaggaaatgtgatgtctctagctttattctttttttcaagattgatttggttatttcttgactcatggctccatataaattttagagctttttttcactttctgtaaaaaatgacattgagatttggatagggattgcattgaatctgtagatttcttttggtagtatggatattttaacaatgttaagtcttctagttcatgaacattcaatgtcttttgatttgcttagtatctttcatcaatgttttgtagtttttaatacacaaatctttcaccttgttagttaggtttaggtgtattactaaattattttattctttttggcactagtttagatgggcattgttttcttaatttcctttcagatagtttgttgttagtgtatagaaatgcaactgattctggtatgttgattttgtactctgtaatttcactaaattcatttgttagttctaacagtttcttaattgaatcttcagagttttctctatatataggatcatgttacctgcaaacagggaaaattttatttcttccttcccaatttaaatgcctttttactttttttcttacccaattgctctagatagggcttcaagtatcctgctgaatagaagcagtgaaagtgggcatccttgtcttgtttctaatcttagaggaaaagccttcattcggtttttcaccattgagtatgacgttagtgatgggcatttaatatatggcttttattatgttgaggtatataatatttgtatttgtatttgacataatctattactagtttgagtttttaattaaaagatgttaaattttgtcaaaccctttttctgcatcttgagatgatcacatgtttttatgctttattttgttaatgtggaatttcacgttaatttttacacactgaaccattctaacatcccaagtacaaatcccatttggtcatggtgtataatccccttaatgtgctcttggattcagtttgctggggtttagtagaggaatttgtatgttcattcttcagggatattggcctatagttttgttttcttgtggtgcttttgtctgactttagtatcagagtaatgaatttggacatgttccctctccccttcaatttttttgaaaagttttagaagaaatggtataaatttttctttaaacgtttgttagaatttcaccagtgaagccacctggtactgggcttttccttcctgggagctttgtaataactatttcaatatctatactagttataggtctgttcggactttctgcttcctcagaatccagtctcggttgattgtatgtttctaggaatttattcatttcttctagcttatccagtttgttggcacataattgttcatagttatctcttttgattctttcttattttgtggcatcatttgtgatttctcttctttcatttctgatttttttatttgaggcatcgctctttttttgctagttagtttacttaaggttttaccaatttagtttatatttataaaaaaccagtaaaaccaattcctagttgtcttatttttttctattatttttgaattttccgtttcatgtatttctgctcaaatctttgttaattccctctttctgcctaatttggccttagtctgttgttattgttctacttccttgagatgtagtattaaattgtttaagatttttttcttttaaattttaatttctttagcaaatgggatgcattctttaattggtgcacacagccatctaaaagaataaagaatcaaagattgccacattaaaagctgccaaattaaattaagacttaatttgccttctgtaaggaagtctttttcactaatattattaaaagtctttttcacaaatattattcaaaaatcttaaaagtctttttcacaaatattattcaaaagatttagccatctgggcaaaaaatctttttccattggccagtaaaacaatttggatccagatattaaaaagacatttattttaggttcagagatacatgtgcaagtttgttatataagtaagcttgtgtcatgggagtttgttgtacagattattttgtcacccagttgctaagcctagtttccatctttgtgtccatgtcttctcatcatttagctcccacttataagttagaaaatgcagtatttcattttctgttcctgcattagtttgctaaagataacagcctccagctctatccatgttcccgcaaaggacacgatctcattcctttttatggctgcatagtatgccatggagtatatgtgccacaatttatttactcagtttaccattgataggcatttagattgattccatgtctttgctgttgtgaatagtactgcagtgaacatatgtgagcatgtgtctttatgatgaaacagtttctattcccttgcgtatacatccagtaatgggactgctgggttgaaaggtagttctgtttttagctctttgaggaattgccacactactttctacaatagtttaactaatttacattcccaccaacagtgtataaatatttccttttctccacaagctcaccagtatctgttattttctgactttttaataatagccattctgactgatgtgagatggcatctcgtggttttgacttgcattgctctaatgatcagtgatactgagtttttttcatatgcttgttagctgcacgtactttttttgcaaagtgtctgttcacgtcctttgcccactttttaatggggttgtttaattcttataaatttaagttccttatagatgctggatataagaactttgtcagatgcatagtttgcaaatattttctcccattctgtaggttgtctattttctctgttggtagtttcttttgctgtgaggaagctctgtatttaattagatcccatttatcatttttttgcttttgttgcaattgctttaggtatctacatcataaaatctttgccagttcctatgtctggaatggtattgcttaggttgtcttccagagcttttatagctttgagttttacgtttaagtctctaacccatcttgagttaatttttatgtatagtgtactgaatgggtccagtttcaatctcctgcatatcgctagccagttttctcagcatcatttattgaatagggagtcctttcccctttgctttgtctaagatcagatggttgtaggtgtgcagccttatttcagggctctctattctgtttcactggtcatgtttctgtttttataccagaatcatgctgttttggataccgtatccctgtagaatagtttgaaatcaggtagtgtgatgcctccagatttgttcttttttgttctccttgcttagtattgccttggctgtttggtattgccttgctgtttatttctttctcttgcctgatagctctggccaggacttaaaatactatgttgaataggagtggtgagaaagggcgtctttgtcttgtgctggttttcaagtggaatgcttcaagcttttgcccattcagtatgatgttggctgtggatttgtcatagataactcttatttttctgaggtacgttccttcagtacctaggtggttgagggtttttaacatgaagaggtgatgaattttatcaaaagcctttgtgcatctattacaataatcatgtgggttttgcattggtcctgtttatgtgatgaatcacatttattgatttgtgtatgttgaaccaaccttgcctcccatgggtaaagccaatttattgtggtggattagtttttcgatgtgctcctagattcattttgctaatattttgttgaagattattgtatgcatgttcatcaagaatgctagcctgaagttttattttctgtgtgtttgccaggtgtttttttttttttttaaatcaggatgatgctggcctcatagaatgtgctggggaggagtccctcctccttaattttttggaatagtttcaataagaatgattccagctcttctttgtatatctactagaatttggctgtgatatgaatggtcctggacttcttttgtttggtaggctatttactgataaatttactgatccaatttcacagttcgttattggtctgcttagggattcaatttcttcctggttcagtctgagagagtgtatatgtccagggatttatcaatttttctagattttctagtttgtgtgcatagtacacaaaccatcatagtagtctctgatggttatttgtatttttctggggtcagtggtaattactatcttatttttaaaattgtgtttatttggatcttctctcttcttctttattagtctagctagcagtccatctgtcttattaatttttcaaaaacacagcccctggatacattgatcttttgaatggcttttcatgtctcaatttccttcaattcagctctgattctggttatttactgtcttctgatagttttggggttggtttactcttgcttctctagttcatttagttgtgatgttaggttgtttattttaaatctttctaactttttgatgtgagcatttagtgctataaatttcctggttaacattgccttagctgtgtcccagagattctggtatattttatctttgttctcattagtttctgggaacttcttgatttctgctttaatttcattatttacctaaaaggcattcaaaagtgggttgtttagtttccatgtaactgtatggttctgagcaattttcttagtcttgatttctaattttattgcactgtggttcaatatgactttgtttcttttgcttaggattgtctaaagtctgattatgtgatcaactctagagtgtgtgccatttggtgatgagaagaatacatattctcttgtttttgggtggagagatatgtagatgtctattaggtccatttggtccagtgttgagttcaagtcctgaatatctttgtgaattttctgcctcaatgatctaatactgtcagtggggtgttgaagtctcccactattactgtgtggaagtccaattctctttgaagatctctaaaaacttgctttataaatctgggtgctcctctgttgggtatgtacctatttaggatagtcagcttttcttgttgaattaaaacctttaccattacataatatccttcttcatcttttttgagcttcgttagtttaaagtctgttttgtctgaaattaggattgcaacccctgtttttttctgttttgcattttttggtagatttttctgcatctctttattttgagcctatgggtgtcaccgcatatgagatgggtctcttgaagacagcataccattgggtcattcttctttatttagcttgccactctgtgccttttaattgggagcatttaggacatttaccttgaaggttggtattaatttgtatgggtttgatcctgtcatcatgttgttaggtggttactatgcagacttgtttgtgtggttgctttatagagtcactggtctgtgtacttatagagacactgtgtatttgcagtgtctgataacggtctttccttttcatatttagtgcttctttcaggggttcttgtaaggcaggtctatgataaggaattccctcagcatttgtttgtctgaaaaggatcttatttcttctttgcttatgacacttagtttgggcagatatcaaattctcagttggaatatctttttttgaagaatgtttaatatagtcccccaatctctctggctggtagagtttccgctgagaggtctgctgtgtcagaaggacttccctttgtaggtggcctgtcctttctctatagctacctttaacattttttctatcatttcaaccttggagaatctgatgattgtctgtcttggggatgatcttcttgtgaagtctcttatgggggttctctgcatttctgaatttaaatgctggcctcactagctaggttggggaagttctcatggatgatattctgaaatatgttttccaagtttcttccattctctccatctctttcagggatgccaatgagtcatagatttggtctctttacataatatcttatttcttggaggttttgtttgttcctttttattattttttctttattcttgtctgactattttatttcagaaagccagtcttcaagctctgagattctttcctcaggttggtctattctgctgttaatacttacaattaaattatgaaatttttgtactgtgttttttcagctctatcaggttggttacactcttttctatactgagtgttttgtttgtcagcttctgtactattttattgtgattcctagcttcctcagattggtttcaacattcttctgaatcttgatgatcttcatttctatatatattttgaattttatttctgtcatatcagccacctcagcccagttaagaactcttactggagaactagtatgatcatttggaggaaagaagacactcaggctttttgagttcttagagttcccacactggttttttctcatctttgtggtctgatgttcctccaatctttttcgaattttttttttttgagatggagtctcgctctgttgcccagtctggagtgcagtggtgcagtctcggctcactgcaagctccgtctcccgtgttcacgccattctcctgcctcagcctcccgagtagctgggactacaggcgcccactgccatgcccggctagttttctgtatttttagtagagatggggtttcaccatgttggccagggtggtcttgatatcttgacctcgtgatccacccaccttggcctcccaaagtgctgggattacaggtgtgagccaccacgcctggcctgttcctccaatctttgaaattgctgtcctttggatttttttcttttgttctatttcatgaccttgggtgtttcatggtggtataaggtgggttcagttgactggctcaatttctggaagattttaggggaccaagactcaactcaggactcgtggactgtgtgctctaaccctgggggactggtatcagttcccaactttgttttctggctcctcaaggttaggaacctgctcactggaggggctgagttacttctggactgttggtcacaacactctgatgggtagtgccagacaaagagcttcatagggcagaggcagcagaatctgttctcatttgcatgtgccagcagcagtgacagtggcaacacagcagggtgcatgcttgttggatgtggcagtgtgctagcaggtgctggggttctggcctctgtgtgggcattcacagcagcagtggtggccacatggcgacatggcttgggggcggggacccccaccagtgactgtgtgtgcattcgtgctggtggtggtattagcatggggttgaagtgctgatggacacaagactgtggaccctctgtgtgttttcatgcaggcagtggtggctgctcaaggcaggggtgactctgctgttctctgtgtccagtttcacattgctggaagtgttggtgccagagcagaatgctggcaaaggcagggctggtgggctctgtgccacccagtgctctaacaacaatggtggtttagtggggtgttggcaacaaggtgcactcatgcaggcagcagcggtatggtaggatgcatgcatgcacatatcctggtggggtaaggaaggcaaagtctgcccatgcaaatacatggtggcaaagcaatgtgggggtggccattggtgagtatgtgaaggccaagtagcatgggggacgctgcagttgtgggaggcaacaagcatgctggtgtctgcagggactgctatgctggagcactctgccagtcaggcctaacccactagaacaggagctgtaatgcaggcccccacgagctacctggggactgcactgcaagcacctgcagccaggctggggcccctggagaggccagcagaccaagggggtactcaaggtggactgccatttcatgggcaggacctccctgcagagttcaggtgacagttcccctagggctacagtctcctatggaaacaagtctagcttagggagatgggtgtccctggccatgctccactataggtgctcccactccaaaccctttgggctctgcactggctggacttctgtcccttccacttctctaagcagctctctctgccaattcaaatgtccatggtggttaaaggatttccccatgccaggattccagagatccatgcgagagtggatcgctcctggcctgttcaattcaccccatccccaggagttcttggggaccaggaaccggtcctggtgtgcactagcattgctcagggttcccagcttcctccctctgcagcccagcatctgtgtcttccctctatctgccctcagtgccttccctgtgaagatctgctaggagtgtgccagtctttctgatgtcccagtcctttggtgggagatgttccttctggctgcatctagtcgaccatcttgcctccttcctgatccagatattctccagtccagagacttaccagcttgcaaaatgtttttgcattcttcttggattccaatctcccctaccttgaaagtttgtgtgttttaggttctgtggagataggctttctcaacaaaatcagagttgtgctctctaggtgagtctgctaaattaaaatcctctcttcttttctaatataggtatttatcactatgaaattccctcttagcaatgctttagttgtatcccatatgttttggtatattttgttttcattttcattggttgcaagagattttcttttttttctttatttttatttcttgtaaaaaaaacgggatatatgctcagaacatacaggtttgttacataggtatatgtgtgctatggtggttttctgcacctattgaccatcctctaagttccctccactcaatcccctccccagaacaggccctggtgtgtgttgttccctctctgtgtccatgtgttctcaatgttcaacccccacttatgggtgagaataagtggtgttcagttttctgttccagtgttagtttctgaggatgatggcttccagcttcatccatgttcctgcaaaggatatggtctcattccttttaatggctgcatagtattctatggtgtatatgtactacattttctttaaccagtctatcattgatgggcatttggtttggttccatgtctttgctattgtaaatagtgctgcaataaacatacaagtgcatgtatctttgtagtagaattatttatattcccttgggtatgtactaagtaatgggattgctgggtcaaatagtatttctggttctagatccttgaggaattgccatactgtcttccacaatggttgaactaatttacatttccaccaacaatgtaaaagcattcctatttctccacaaccttgccagcatctgtcatttcctgactttttaataattgtcgttctgattggcatgagatggtatctcatagtggttttgatttgcatttctctgatgatccatgacattgagcttttttcatatgtttgctggccatgtaaatatcttcttttgagaagtgtctgttcatatcctttgcctactttttgatggagttgtttttttcttataaatatgtttaagttacttgtaaattctgggcattagacctttgtcagataggcagataggaaaaattttctcccattctgtaggttcactctgatgacagcttcttttgctgtgcagaagctctttagtttaattagatcctatttgtcaattttggcttttgttgcaattgcctttggtgtttttgtcatgaagtctttgcccaggcctatgtcctgaatagtattgcctaggttttcttctactgtttttattgttttgggttttacatttaagtctttaatccatcttgagttaaattttgtataaggtataaagaaggggtccagtttctgttttctgcatttggctagccagttctcccaccaccatttactgaataagagatcttttctccactgcttgtttttgtcaggtttgtcaaagatcaaatggttgtagatgtgtagtgttatttctgagatctctgttctgctccattggtctatttgtctgtttcagtaccagcaccatgctgttttggttactgtagccttgcagtatagtttgaagtcaggtagcctgctgcctccagctttgctttttttgcttgggattgttttggccatccaaagtcttatttgaatccatatgaaacttaaaatagtcttttctaattctgtgaagaatgtcaatgatagtttgatgggcatagctctgaatttataaattactttgggcagtatggtcattttcatgacatcaattcttcctatccatgaggatgaaatgtttttccatttgtttgtgtcctctcttatttccttgagcagtggcttatagttctccttgaagaggtccttcacatcccttgttagctctattcctaggtattttactctctttgtagtgattatgaatgggagttcattcatgatttggctttctgctttgctttcctattattgctgtaaaagaatgcttgtgatttttgtacattgattctgtatcttgagactttgctgaaactgcttatcagttaagaaattttggggctgagatgatggtgtttgctaaatataaaatcatgttgtctacaaacagagacaatttgactttctctcttcctatttgatcaccctttctttctttctcttgcctgattgccctggtcagaacttccaatacaatgtagaataggagtggtgagagagggcatccttgtcttgtaccagttttcaaatggaatgcttccaggttttgcccattcaatatgacattggctgtgggtttatcataattaactctcattattttgagaaatgttccatcaatacctagtttattgtgagtttttaacatgaagggatgttgaattttattaaagccttttctgcatctattgagataatcatgtggttcttgtctttggttgtgtttatgtcatggattacatgtattgattttcatatgttgaaccagccttgcaactcagggatgaagctggcttgatcatgatgaataagttttttgatacactgctggatttggtttgccagtattttatgaggattttcgcatggatgttcatcagggatattggcctgaagttttccttttttgttgtgtctcttaccagttttggtatcaggatgatgctggcttcataaaatgagttagggaggagtccctccttttcaattgtttggaatagcttcagaaggaatggtaccagttcctctttgtatttctggtagaattcagctgggaatcagtctggtcctaggatttttttggttggtaggccattaattactgcctccattttagagactgttattggtctattcaggaatttgacttcttcctggttttgtcttggtaggatgtatgtgttcaggagtttatccatttcttctagattttctagtgtatttgcatagaagtgtttatagtattctctgatggtagtttgtatttctgtgggattagtgatgatatatatcccttttatcattttttattgcatctatttgattcttctctctcttcttctttattaatctagctagtggtctatctattttgttagttttttcaaaaaaaaaaaacagctcctggatttgttgatttttttggagagtttttcatgtctctatctccttcaattcttctctgatcttagttatttcttgttttcggctagcttttggattagtttgctcttgcctctctagctctttttaattgtgatattagggtgtcgatttgagatatttccagctttcttatgtgggcatttagtgctataaatttccctcttaatactgctttaactgtgtcccagagattctggtatgttgtctctttgttctcattggtttcaaagaacttctggatttctgccttaatttcattattgaaccaggagtcattcaggagcaggttgttcaatttccatgaaattgtgtggattttgagtgagtttcttaatcctgagttttctctgcttgaaaattcttttaagaatgttgagtattggtcctcaatctcttctggcttgtggagtttctgctaagaggtctgccattagtctgatgggcttccctagtccctctggacaattcctcaatgcacaggaaagtgactaacaaaagtcttctcaggttcttttttgtttgtagaggttaatgaaagtttgagtaaagtaaattcatcaggatcataggcactactttacatctttttcttccttcttcttaccaaaggagagttctccccatccactctccattcctcactatagcagtacctactgcaatattacacaaagtggtttacttcccaattcagtctctgaaagggacatttcctctcatcttcctcaccctctatgttagggaatgaatgtttttctgccccccaaaatttatatgttgaaattctaacctctagtgtgatgacattaggaggtagggcctttgggaggtaattaggtaatgaaggcagagtcctaataaatgggattaatacccttataagaagaaataagaaatcctgcttcctctctctgttatccacgatgtaaggatataacaagaagacacccacctgcaaaccaagaggagtgccctcactagacattgaatctgccagcaccttaatcttggatttcccagcctccaaaactgtgagataaatgtttgttgcttaagccacctaatctatagtaatttattacagcaacccaaactgactaggacactatagtctcctcacatagggcccagcaccatttttcctccttgtcttactgaatgactactctagtgcagaggtgatctgatccattacatactttagtttcagaaattgaccagaaagttacaggcatcatttgtgctcacaactcactggctagatctagtagcagggccccacccaaacacaagggagccaggaagtgcaattctactttgtgtctggaatgaggtggaatgtcacatatctgggtatcagcagtagtgctgccacactgccctcttgttcttcattttgtgccattctctctcctactcattcttgccatgctggcctcccatcagttcctcagttcctcatgtgacctttgggcatgctgctcgctctacttaaattttctttctcccaccttgactgacaccttctgatttctcaggtcatagctaaaatattttcttctcagagaagtttgctataaaacctctcctccctccatctgaggtagccccctttattactctttttcaaagctctctcgtctatttattttgcagctctcatgttcatttgtaattatatggctgatgtgttcacctgattgagtcatgtccgtcccctccacttcactgtaaatgccctaaaagaagtgatcaggctcattttatttaccaccttgaatatacttgatgcctagcttgcaattggacaatatatatttgctgaataaataaatgaactcaggaccttttagtggtccacctcaagtaactttagaattacatttctctctcactttatacccatgaattatattagacagcactgtatatgacatgaattacacatttgacaagctatattgagtagcaaatacaaagaaaacaagcaataagaaaaagataggttaggctgtagcaaaaacactcaacagtgaaaagcaaaagaagccactcacgattttaataatgtaaaactctacaaaatctaatattctttcaaagcaaacttggcacaataaatttgtatgggaaagcctgagcttggtcatcagatgtaatcatcaaggaagatggcaaacagtatggaagatagagaagtagactttcatcataaaacacctgagaagttttttagtttttttgtttgtttgtttgtttttcaaaatagagtcattagccccaatttgtgtagcccttactcacttcctgggcctcagaaatactacttcctgttatacagctgttcccaaaaagtttcaagataaataaagtacacatagaacggtttaaggaagttcccttagaactttaagtaacagtcttaataatgggcttgttccttgacagttgctttctttagtaactctacggttatggtctggcctggtgggagccaaaggttagactttaccatttgtcaaggtgacagctcttgaccccatttagcttttaaccttttggcttattagaaattccctctaaagtatatgccagttttcttcattgtaaattgcgaactgaggcgtctctggctgatgttatattgttcactttttcatacattattgctttgtgaaaaattcatgaagaataattcatgaacatttttagattttacccatgagttcatatgaaccagatttggtaatatgctaagcaaaatagacaagaaataaaccccttatctgattattaatacagctgtaagagtaagcatagaaatggtgttttaaacatcagagagaaattttcagtggggtgccaaagggatttgctgtgataccatttcttttataattgtaactgaattatttacatcacttttatataagcttgaggaattctccccatttacagaaattagaaatatgacattttatgacagtgattcttcgcatcttaacgtgtgtgtgtgtgtgtgcgcgcgcgcgtgtgcgcatgcgcacgcatgtgtgtgagagaaatatgggcctgtttgagaatttggcaaaagtgattggtcttctttccagaaaaaaaaaaatctgcatataccacttcccctccaaaatttacatacaatttgaagatattcagtgacccatttgaagtacatttgggaaaaagaaaacaaaacaagcaagctacagagcaactacttaaaagaacattttaaatcaatgttccaaacacgtaactctcttaaagtttgtcactgcagggctaattctattaagtaactgttaatcctgcacccctacatagtgacccgccttggttagtcagcagtcatgtattattaccaaaatattacatagtttctgtcctggtggataaataattactactttgaactcccctagccctcaactgttaacctgccccatcagccagataagtaggaccatgtaatgatccagcaatgaggaaatttaagcctgattgatataatacgggcctccaggatgcaatgtctacacaaagaccaattctgattgttcagcgtccatgccttatttaggtgttacgagatattttgaatataaactctgatttgcccattttatttttcctaagagtaataatctactttgaaaaagagacagaactctagatactttctttactccactgagataagagtataatgaagcagttgtctttgtcctgtatttttaaaggtaggaacctgaaaagattattcacaggttaatcttccaatagaaatgcaaaaaaatgagaggggaaaagagttcgggaatagcagatgctgggtagtttgggtaagggagggaatatagggaatagggaatatatagagggaatatagccttagggtgtttagccaggtatttttgactgcctagactcatgtcctttcagaaagcatcacacaatcattccacatgattcttgcgaagcccctctcttgttcctcacttcctaacctccaggcatagccagtcttattttctcattctctattagcagtaatgtatctaaaaagtaaacatttaatccaagcaaatagccaagcagaatccaagcagatatattgataatgggagaaagaaactcttttctatgggaggttgtgcctccgtctttttttccaagtggagaatgccttcatgtagatgtagctaagaagaggtaagaaagtgatggagggaaaaagtcctactcatgacgaggtgagtctctgaggcactgactctacagttactcattttatttctacatctttaaaaatccttccagctaagataactaataaactttcatcatttattgttgttattatttaaattgcttatgctattttgatttgagtttctgtcacttgtaatcaaaagagggctgattaatttagagggttaggtgaaaggccatgtttatgtaaagaggggatttgtaaatgatgcaattatcagagactaaggcacaaaattctaaatagaagggacagattgccaatattaacacaattgactttacagctattgtgataatttttaaaagcatatcctctgacaatgttttaattacttagtaaaaaaatggcatctattttactcagtgcaaatattctgcagtttggaaatgcaatacctttattacgatagccaaaaataccacacactgaattaatctagttaaatctcaactagaaaaaatacatatttttgatgatttatgttaagaaagtcttaaatattctagataaaacaacaggggaagctgaggttgagcttttcaaatactttttccaataagattgaatatatggaagctttatttttaaaatactatttaggctttctgatataaaatcaaataacaaactattgctttattaacttatttgttactcaatgtccagggagctttagaaacaaaagaactgctagatattatagctctttaaactatatattttttatatttaagcatcagtattctagcctttctagtgactaaacaaactcataagaacattttatgaactaatgcataattattcccattcagtagagagagtcatcaagcttcatagcatttactaaaagctttagccataaatggaattttccataacagcagaaaactcatcacaattatatgaaaagtagattgtaagatagtataaggggacaaatggttataaagtaaatgatttgcaataattccatctgctgcctaaatgcaaacacatggttgacaactcaagagagcaggagaaatgttcaatctccccatcagtctgggaatcttcatgggaagcccactccagtcccatcatatgggaaccattgggtatcccagagggctgattggaagacaaggcacaggacattaatctcaaagactggcatgcagatctaggcagcaactctgtgcttcaatcagtgggggtgccatgttgaagagactggatgatgccatagtgctgcaagggggggcaccattcaagcaaaggcccaaatctgtggctgaattttttataaatcccaggtggagctttcccctggcccagaaacaactaaaagttgggactgagttctggtactcacctgtctttaccagactgggaaaaaactgtagggcagcaatataatttcaggacagcttttaacttccagtgctcactataaaacatccccagagtgggaaacaatggcagggcaacaagttagttccagcaaagtgtttttgtaccagtgcacactataagactcccagaatgggaagaaataacaggccaacattgaagtttcattactaaggaataaaggcctaacaccaccaaaaaaacccccacaataattggaagaggtagctgactcttcaaacacacaagcatcaacataaagacacaaggattgtggaaactcagggaaatatgacaccactcaaagaaaccaacaaaactccaacaatagacacagaagaatgcaacatctccaaaatgtcaggcagaaaattcagaataattctcttaaagaagttgaaagaatcacaataaaacacagattgaaattggaaaacaatccaggaacaaaataagaaatttcacaaaaataaaaacaattttaagagagcaaacaaattttagaagcaagcaatataataactgaactgaaaaactccatagaaagcttcaatagcagacttgatcaaaaagaggaaagaattagtgagcttgaaaaaagaataaatgaaattacccagtcagagaagcaaaaggaaaaagaatttaaaaaaagagtaaagaagaataaggggacaccatcaagcaaactaacttccacataatagaaatttccaacagatattatgtaaaagaggaaaaggtctagaaagcatatttcaaaaagtaacggctgaaatttctgaaatctggagaaaaccaacactatccaagtgcaggaagctcaaagatattaaacaaattcaactcaaagagaaaactacccagatatattataatgaaattagtaaaaatcaaaaacaaagaaagaatactttaagcagcaagagaaaagaaacattacattcaactgatctctaatatggctttcagcggatttctcagagaaacttagcagaccaaaagaagtgagatgctatattcacagtgctgaaggaaacaaatacaaaaagccagctaagaatactatacccaggaaaactatcctttaaacaggaaaaagagataaaaaactttctcagacaaacaaaagctgaggaaatttacaacacgacacttcgcctacaaaaaatgctacagggaattcttcaatctgaaaaaaaaatggatgctaatgtgtaaaaaacaaaaaacaaaaaacaaaacaaaaaaacctaaagtatgaaattcactattaaaaaacagaaaaatgcataattctataatactataattagggtaagtaaacaatttatatcctaagtatgaaagctaaaaggaagaactattaaataatctcaacaattgattaagagttaggcaatataaaaatatgtaaattgaaacagcaataagtcaaaatgtgggagggggtggtattacaatgtagagtttatttttgtttatttgcatcaaagttaaactattatcagtttaaaataacctgttataaatatatttttataagccttgtagtaacaacaaagcaaaaacctattatagatacactaaaaataagtagccagaaatcaacatgtcctaatagagaaaattattttgtgacaaaaacgaaagtaagagagagagagaaaaagaaagaaatgattctacaaaacaaccagaaaacaagtaacaagatagcaatactaaatccttacatatcaataatattcaaaccttgaatataaatgaattatattcttcagttaaaagacagagtggctgaatgaatttttaaaaggatccaactatatgctgtctacaagaaactcacttcatctgtaaagacattcacaaactgaatgtgaagatatttaaaaagatattagaagcaaatggaaaacaaacaaacaaaaagagcagaagtaaagctataattatcagataaaacagaccttaagtcaaggacagttaaaaacaacagagaaggcaatagtaggagactttaacactccacttttggcagcagataggtaatctagacaagaaaatcaacaaagaaacatcagaattaaactttactctagatcaaattgacctaacagacattttcagaacattttaccccatagctgaagaatgcacatttttctcaacagcacatggaacattctctaggatagaccatatgttaggtaacaaaacaagttttaaaaagtcaaaaaagtcaaaatcatatcctgtatattttctgaccacaattgaataaaactataaagcaataagagaaggaacattggaaactgtacaaatccatggaaagaaaacaacatgctactgaaaaacaaattggtcaatgaataaattaaaaaggaaatttaaaaaattttcttaggacagatgaaaatggaaatacagcatacaaaaacctagaggatataccaaaagcagttctaggatggaaatttgtagcaatcaacacctacatcaaaaagtagaaagacttcaaacaaacaacctaacattgtacttcaaggaactaaaaaagcaagaacaatcaaactcaaaattagtagaaggaaagaaataataaagatcaaagcataaataaataaaatttgaactacaaaaatacaaaagatcaacaaaatgtagttggttttttgaaaaaaaaatcaagaaacttttagctacaccaaccagaagtctaaaaaataaagtcagagatgaaaaagaatatattacaactgatactacagaaatacaaaaaaaaaagcaacagacaagattatgaaaattgatacaccaacaaataggaaaacctaaaagaaatggatgaatttctggacacatgcaaaccatgaagattgaacccatgaaaaaagagaaaacctgaaaaccagtaatgagtatgagactgcagtagtaataaagcctcctattaaaggaaagcccaggatctgacagcttcactgctgaattctgccaaacgattaaagaataacctataccaattctctttaaactgtttcaaaaaaattgaagagaagggaatacttctaaactatacttctaaactcatcctaaaaggccaggattatcctgatgccaaaactagataaaaacacaacaaaataggaaaactacaggtcagtatcagtgatgaacacagatgcagaaatcctcatcaaaatacaagcaaactgaattcaacaaaacattaaaaatattcattatgaccaagtgggatttatcccagggttgcagggataattcaacatatgtaaatcaatcaatgtgatacattgtatcaacagaatgaaggacaaaaaccatatgctcatttcaatagatgctgaaaaagcatttgataaaatttgacattccttcatgataataactgtcaacaaactggatacataagaaatatacctcgaaacaataaagatcttacatgacaaatccacagctagcatcattctgaatggggaaaaatggaaattctttcttccaagatctgaacaagacaatgatgcccacttttaccactgttattcaagatagcactggaagtcctatcacagcggttaggcaagagaacgatacaaagtgcatctaaattggaaaagaaaaagtcaaactatcattgttcacagatgacatgatcctatatttaggaaaacctaaagactcaaccaaaacctgttagaactgaaaaacaaattcattaaagttgcaatatacaaaataaacatacaaaaagcagtaacatttctatataccaacagtgaacaatctgaaaaagaaatcaagaaagtaatcccatttacaatacttacacacacacacaaaaacacatctgggaataaatttaaccaaacaagtgaatgacctctggaatgaaaactataaaacactgttgaaaataatttaagaggacacaaaagattaaaagatatccatcccatgctcatgaattggaagaacactggtctgggcaaagattttttaggtaagacctcaaaaacacaagcaacaaaagcaaaactagacaatggaattacatcaagctaaaaagcttcagcacaacaatgtaaatgatcaacagagtgaagagacaacctgttaaatgagagaaaatattcgcaaactattcatttgacaagggactaacatccagaatatacaaggtaaaaaagtacataatcccattgaaaagcagagaaggatatgaatagacatttctcaaaggaaagcatacaaatggctaatgagtgtatttaaaaaaacctcaacatcacttaattatcagggaaatgcaaatgaaaaacacaatgatatatcatcccaccccagtttaaatggtaattatcaaaaagacaaaaaataaacaatgctttcaaggatgtagagaaagagaaatgctaatacactgttagtgagaatgtaaattagtacagctcctgtgaaaaacactatggaggttcctcaaaaaattaaaaatagatctacagatgacccagcaatctcactgctgggaatacattttaaaaaattaaatcactgtattaaaaagatatctgcactcccatgtttattacagcactatccacaatagccaagatatggaagcaacctatatacctatcagtagatgaatggataaagaaaatgtgggccgggcgcggtggctcacgcctgtaatcccagcactttgggaggccgagacaggcggatcacgaggtcaggagatcgagaccatcctggctgacacggtgaaaccccgtctctactaaaaatacaaaaattagccgggcatggtggcgcgtgcctgtagtcccagctactcgggaggctgaggcaggagaatggcgtgaacccgggaggcggagcttgcagtgagtcgagatcgcgccactgcgctccagcctgggcgacagagcgaaactccgtctcaaaaaaaaaaaaaaaaaaaaaaaaaaaagaaaatgtgaaatatatacacaatatagtattattcagccataaaaaagcaatgaaattctgttatttgcaacaacatagatggaactagagtatattacgttaagcgatggcacaaaaagacaaatattgcatgttcttactcatataaggaagctaaaaaagtggatctcatgaaggtggaaagtagaatgatggttaccagacattgggaagggaagcagggaggagatgaagagaatttggttaatgtgtaaaaaaatacagttagatagaaggaataagttatagtgtttgatagtatcataaggtggcaatagtaatttattttatattgcaaaatagctagaagaagagatttggaatgttcccagcacaaacaaaggataaatgtttgaggtaactgataacctaattactctgatttgattattacacattgtatacatgtataaaaatatcacatgtaccctgtaaatatgcacaattcttatgtttcaataaaaaaagagagaatggagggtactaggaataaagttaggacttctgcacgctaaaaaaaaaaaacactctgaacactcttagaagacacatggtagagatctcactctttctgacaatgaagtttctttaactctactccaatgaggcctaaaagtgaatcaccaagcccatatcactgccagctggaactaatgccagatttatttgtgtgaacaaggccgtaggctaaattacaatgctctggagcaagattcatagacttgggacactcttgactctggggacaatacaaacaactaagtcataggggaagcatgactggactgcatcggggtgagcctagacatgactcaccacgagggactacctgatccaagcatatcatttgtacgattccagtcttaccacaccaaaacttgcagaatcaaaccaacagcttacaagtggttacatatctgatagattgaatgtgtcccagaaaagttgtgaggtaagtgtgtaaattacagattataaagaagtgagaaggagaggtaggtatggaatctttctgaagaagccttgaagtgatattgccatcaaacaaaaaagatgcatgaagcacatattctgccctcagctctgtgctgggtgctatacatctgacacgatttagatcccctgcttatcctttgaaaggatttcatgggttctctaaaattctgcaatacctagatatggttgccgtggacaccatgttgttctgggtccttctttttatattcaggaggtgaccaaaggaggggtgaattaaaaagaagagactatctctgctttccacttgttcctatctcagattattttttgaggctcttctctcaagagatataccagttttcatatcagggcaaaaggatggaaaaggctacttattcaagtatcttcatgcctgggtagagaaatcaggcttcagagatgaaccagagagtggagcaaagacaaagtgctgactgttgccttacccccactctgtcttgaaccactcatctcttaggactagagagtaggaaataagaaaagaaaattaaatttcaggagtaactttacaaggcttatgccatgctctctctagaaaaatgcaaaaatgaaaatattcttattttaaataattaaaaaataattctccactaagattaatggtgatttttaactgggcaaatgtaaaaatgttttttgcaacaagttttggtggtaagtaaaactacatatgtagttctgcagatataaatatataaattgaataataaaaatgtttataaacgatttctgtaagataatataccaacaattatctatggatggtgaaattatgagtaattttaatattaatctgaataagttttgagttttttcctaaactttcttcagtgatcacctgttacacttataatcaggaaaatcagcattttattaaaaaggcaagcactaaatgagtattttaaaataatattgaccatgcatatatcactaactttggaggcagcaagatgtagagttgaatatcagctctgccacatactaactatatgattttagtaaggccaagtttccctctttcctgagtctcaaagtgcacatcactgaattcatgagaaatgatctgtcagtggtatacagtgagtgattaaagtcacttatgggcagcttacaaaacatcaaaaacaaagttgaaggtaacctaaatgttaatgaaaatatataattttttagattattctaaataacacacattaagatggcatggtttaacactgtagagagactttaagttaaaagactaaaaatacttctatttaaatggctacttttatggattgctttgggtctccccagaattcatatattgaaatcctcacccacccccagtactttagaatgtgatttggtttggagataaagtctttacagaggtaatcaagttaagatgaaatcattagggtaggccctaacccaatgtgagtgacatgctttttttttttttttttttttttttttaagttggagggtatttgaacacagagaggtgcacagatggaagacaatgtgaagagacatacagggaaggaagttgtctatctacaggccaagaagaaaggccagggacagatctttctctcagcttactcaaaaggaatcaacgctactggcaccttgatttgagactcctagcctccagaactgtgaggcaatacatacatttctcttgtttaagccattcaatttgttgtacttttgttatggaagccctacagttactttacttttccgtacattaatatttttgaatgatcactctttatttgtcttcaccctcatgaaagcaaaatgtacaaatagaagtctagcatttatgaaagcacttggcatgaagcaagataacaaaaatatctacataatataattttttaacatatttctttttacttatttatttacttacttattatactttaagttctgggatacatgtgcagaacgtgcaggtttgttacataggtatacacgtgccatggtggtttgctgcacctatcaacacatcacctacgttaggtatttctcctaatgttatccttcctccagccccctcaccctctaacaggccccagtgtgtgatgttccactccccatgtccctgtgttctctttgttcagctcccacctatgagtgagaacatgtggtgtttggttttctgttcttgtgttagtttgctgagaatgatggtttctagcttcatcgatgtccctgaaaaggacaagagctcatccttttttatggatgcatagtattctatggtgtatatgtgccacatttttgttatccagtctatcattgatggacttttgggttggttccaagtctttgctattgtgaaaagtgccgcagtaaacagacatatgcatgtgtctttataggagaattgtttataatcctttggatatatacccagtaatgagattgctgggtcaaatggtatttctggtttgagatctttgaggaatcaccacactgtcttccacaatggaatctgtctatctacaagttgtctatctacaagttcaatggttgaactgatttacactcccaccaacagtgtaaaagcattcctatttctccacatcctctccagcatcagttgtttcctgactttttaatgactgccattctaactggcgtgagatggtatctcattgtggttttgatttgcatttctctgatggccagtgatgatgagcttttttttatatattttttggccacataaatgccttcttttgagaagtgtctgtttatatccttcaccctctttttaatggggttctttgtttttcttcttgtaaatttgtttaagttctttatagattctggatattagccctttgtcagatggatagattccaaaaattttctcccattctgtaggctgcctgttcactctgatgatactttcttttgccgtgcagaagctctttagtttaattagatcccatttgtcaattttggcttttgttgccattgcttttggtgttttagttatgaagcctttgcccatgcttgtgtcctgaatgatattttctagtttttcttctagggtttttatgaccaatggaaaagaatagaagcctcagaaataactccacactctacaaccatctgatctttgaaaaacctgacaaaaacaagcaatagggaaaggattccctatttaataaatggtgttgggaaaactggctagccatatgcagaaaactgaaactggaccccttccttataccttatacataatagaattttaaaaattaatattgtttaattaagtttttttcacagatggaatctccaaattatgcgttttctttcaaaaagagaaagcaaaacttcaaattataaagacaacttgtttgctctctactgaagttcacgatacattaagaataaacaaaaatatataggatgaaagaaggcaactttaagttgtactccacctcatgtcatatgttcatttggatgtacttcataagcacacaggactatctagaaggaagtttactcttacaagtcactgaatgctaatgtatagttttgatgagactagaaatatcctggtttaaggctgaaaccctgaaagctaatgactgaggcaattatgatgtttccagggggcacaatggaattctgagcttttatggtatttaattacattgctcctgggccatttacaaggtcattccagtttataagcaaatatctaattgttttatctcatacccaagtcttaccaacactcttctttcttttcagagtaacagttaatgcctcagaaaacatcattaaaatgggtatttcttcatataacaaggctcttattatttcagtcacttggatcttggatggacattgtgctttcaagcatttagaagtgtgaattcttgttgatattcatttcaactaaatgggaggtaatgtgctaagctaaaaatgaatatgatctagtcatactcttattctaaagccacagctagggaatgaagtcttgtccatggcaaagatggaaaataggaatgaaaaacatgtgaaggagaaataagaaaatgagtgctttgcattggccgtgtacctagatactgctcattggatgctatgaagttgtgtgtgtgtgtgtgtgtgtgtttaacaaataaaaagtaaagaaggaaagattgtcttttgctaaaggacaaatagagagcaagttggagaaatgcagtatgaagccctgcctttctgatctcaaatcccattcacatctgaaaactgcacatataatatatacaatttaagtaaaaagaaattgtgaactgtttttctgaacttattcttaataaaaggttattaggttatacagttttaagagtatgacttaatcacttgggtcaattcagccttgccatttgggcataggatattctctatttgagtatctgaggtgacatagtaaatttgtctatactttaagactgataccttgcttgctcccaaagttatatcaaatccacagttattagaacaataaggtaatattagagatcagttagtaacaactctcctgtctgttatttatttactcattcaatatatcctgtgtgtgtgtgcatgtgtgtgagtgttaaatccggtgctgtgatggacattagaaaatccaataatacacaaatcagaaaggatctctccttttaagtttacagaatcttcagacccagaaggaactagatatttacctgctcctgtaggctaacggggataaaaagagactggaaaactcttaatcaacagttgcagtgtcactgggtgtgaagtgagattacttaatctcaaaaataggatttcttacttagctctgaatctatctccagcacccagtatctgatgaatgtctgttaccctcatctaaactgaaattttccattaaatcttttatcacgggtcacggccagacacagtgatttaagattgacttccacttactctttgccttgggaaaactcttagaaaaactgtcaacacacagcctggaagttggttaatagatacagaaatatggttaaatagaaggaataagttctagcattagataggacagtaggaaaactatagttaacaataatttattatatatttcaaatagctagaatagaattataatgtacccaacacatttttatataaaaatgcaattggaattttgataggggttgaatctgtatattacatggacagtaaaggcatgttaacaatattaattcttctaatacatagacataaaatatgttttcattcgtgtatttttaaatttctttcatcaatgccttatagttttcagtgtacagatctttcacatccctggttgtatttattcttctgtattttattattttcatgctattgtaaacggactgtctttgtaatttctttctcaaatagtttgttgttaatgtacagaaatgcaactggattttgtatgttaattttgtatcctgcaacgttgctgaatttattaattttaagttttttgatgaagtttttagagattcctataaaaaaccatgccttatgcaaatagagacaatttaacttcttcctttacaatttggatattttttacttccatttcttgcctagtggccctggctaggactcccagtactatgttgaatagaagtggtgagagtgaactcccttgtcttcttgctgatcttaatggaaaagcttttggctttacaacatgagtatgatgttagctatgggatttcctgtgttttcatgatgttacttcgggtcctttcatttcaacttgaagaactccctttggcatttctcttaaggcaggtctagtggaaataaactctcttagctttcttttctctgggaatgattttatgtctcttcatttctaaagtacagcttttacagactcattattcttatgtggcagttttgtttttcttttagtactccaaatacatcattccactccctcctgcccagcaaagtttctgctgagaaatctgcttgtagcctttgtgagtacccttccatgtgatgagtagtttttctcttgctgctttcagaattctcactttgtctttgattttgacaatttgattttaatgtgtctaggaaaagtattttttgcgttgatcttgcctggagcatttgagcctcactaatctagacatccatattcctaccaacatttgggaagttttagccactaatgaatgtaatgaatataaaatatattgacatactgaacaacatgaaaatcaaaaacatttgcatggtaaaaattcaccataagttaaggcaaatgataaatgtcaaggaaggaataaaagtatttgcaactcagatcataaacaaagtacaaacttctctactttgtaaagatttgacagaaatcaacaccaaatgcccagtgaaaaattagcaaaggaaatacggtttaccgagaaagaaaaacaaatggttattaaacttatgaaaatatgtccaggttcatctataagaatagattgaaaatgaaaacaagtatatcatttctcaccaattagatgtacaaaaatccaaagtttgaatgtttttgaaaggatgtgtgaaaaatacactttcagactttgctgtaggattataaaatggtgtaactactataaagggaaatctggaaatttctacaaatccacagaaacaatttaccctttcaagcagcaatttcagttctggaactctatcccacagatactttgtacacatatgaaatgagaaatgatgttagttattcactgtaacattgtttttcacagcaaaaaagaaagaaagaaagaaaaccctggaacaactcaaatattccctgataagaatttatttaaataaaccatgatatttccacatagtggaatattatgcagttgaaagaaaaaagaggaaaagcttcatgcactgatatgaaaaaaatctttagtatgttttattaattggtaaaattaaagctaggagcaggacagtgagaaaggaaggaaattgataaaaatggaaggaaattatgtatatgtatatttgtgtttgtataacatataatgagtattacatatagaaacactgaaaaaataaacatgacactaataaatataatttctcatagatggggaacagggtgaaggaggaatagatgggattgggagacagacatctccgctttacctttttataaagtttgacttttaagtaatatagctattttacctaccctcaaaaatattaatttaggaaggaagagataaaagagaagaagaaaggaaggaggggaagagaggaagggaaagcgggaaggaaataagtggatctagaatatttgcactggttttgccttccctcatccatacttccttcacaatgtaaaatagcaccagtgagtcagacacatgcttgataccacttgggaaacaaaagaagaatacctgagactcctatttctgtcatcaggagctaccactcttctcagggttcttcaaccttgcattgttttaggtatgcaactaaattgcaactaaattattgattctgctggaaggttatatgagtttatgcactaaatggtttcatcatttatcaccagccctgcagtgagacaccatgggcatatatcagctcttaggaaatatgttcacacatacacactgtggcatgagctttttctaagtcaaagctgaggcctcacaaaggatgttaaccttctaggtgttttaaatacatccatctgtgagaagacttcaaaatggattttgcaaaaggtaattggaattaacagctttttgtgatttggagcttggcatagacaccaaacaagaacaaaatgatcatgttcctaggaaattagggccactgtccatagctgttaggtctaaatggagtttgtggggttgagaatagtgcaatataaattgatatggttatttgtgtggtgcagcagcaaggcagaagtcagggaatcttccttggttggaggctttagaaatctccagtataataaaatctggtataagcactgaacaaataaagaggggggcaaccttcctagagaaatgaaatgaatgcaggtccaaaattcaaagctcaggaaatctgactcaacatctggttgccttcatccattttcaagtactcttattcaataataaggcaagaagaaaaatatacctttataatacccacattcttgctgccaattctgaatctcagggcacaacatcttatattcatttatttatttaccaatggccaagcattatgctctagtctaacatcgtttctgaagtattttgaatctacctccagtgcgaaggtaaacgagtgaatttccactcctccaccagtagatataagactttaggccaatcatcagcattttctcatctaaaagtaagagaatttgggttggaagctaacaagtttttcaatcctaggaattctacattatatgtatactctgttgcagaataaaatgcttcataagcctaagtagaatcttagaagctaggagctgaattctgaatcatttagtggagtaattgtctctaaaaatgctaatggaatttcacaaatgcttcctgccacacccactccttttcagagactagaagatgaggttgtgaatttatggtgatagagcaaacacccaaacacacagcagtttaattttcctttattattatatttttaatttactgtggatgactaacacttattagtattcttttctgctgccacgaacactgaaagcttctttctgtctgggtcttggcaaagtatgaaagtaaataattctttaaaatatacatagtcagtccaagaaaatcgggagacctcaattgagtttggagtcactgatgtacttcacatttaccttagaaaactgatctagagtatcaaagaaattaaaaataattaatttttagaatcacaatgcagtataaatcattcaaccaaactccacactctagatggccattaatttgcaagtgaagtaggtcactgggactcttaatatataccagggattttgttttgttttgttttttgtttttttgcttttttgcttttttttagtttttttaattttattttcaatacagtgggtacatgtgcagatttgttacatgggagtattgtgtgatgttgaggtttgggatatgaatcctgtcactcgaccaagccttttgaattgtgaagaagaaatctttcaaacatcctgccagctacccactgctggcaatatgagttggggagagtaggggagagaattcaggtaggtaggaaagcaaggctgcataataacacttacacttttacaaacagtgctctaaataaattcagagaatttcattttaacatgactgtcacgttttgaagaaaccttaagaccccaggactgaggtagctagggaaccagtttttcaatagtaacattattcacactgatagagggaagacagagacttatcaaaaagaaaggatagagattacccagaaagttgaaatagaaaacagataaaagactttcttcatctctaagaattactaagaaaagggatgtttgcaaccatggggtcatattcaacgtattttaataatcaatttgcttgggcacaaaccaatgacattttctcttctggccatgaccaaccagaagatatattcattgtaaacagtcaactgaataccagtgttctacaatcctgccaggaaaaggaacctgtcctcacactaaatccatttttagtttcttttctacttgcaattttcattttactaaagaagaaatgacaaaaaaaaaaaaacagaaaacagaaaaaacacccagaaaacattacccaccaggaagttaaggagtttgtgttatagaaaattctcagagaaactttgcactatgagtcctattaattcatgaactcctgcagggaggtaccatgactactacagctcctagaagaacaattcccagaagaataaatgcagtcagtgttgctgactcaccgcatgacagaacagacacgacagcctaagtaagagccttggagttatttttcctgcttgggattcagattcaaaacaaatgatgatgatgggctcctctctgcttttgggtggacatgaaccgagtaggaatatcaaacttctgaattcaatcacaaccatcacttaggctaagaagaatagaagaataaaaaggggaaaaggacacaagagatgaactatttcagcaaagaggggagtaattcccataccagcattccagccatatattactagcatatggtagaaagatgagatttattaaacaggaatgaagaacatgtagccaggccccaacatgagccaaactgttaccattgctagaatttatataactatgaatacatgtagtgacctgttggtcctccagaacttcattttgtaagaaggaagaagcagctccatggaaaaaaataaaccgaagacaaaacagataggcataacaaactttacttaagagcaagctttaatctttcaagaggaagagtaattcagagtaaatcattctatctgtcactctcactaaattaaaagaaaaaatggtttataaaatattaacagggaaaaatctaatttacttacatctagcattaagaagaatatcaaaatatgaattaaaaaaattaaaaacctgaaaaaaaaatcgaggaagagacaagatggacaaataggaacagctccagtctacagctcccagcatgagcgacgcagaagacaggtgacttctgcatttccatctgaggtaccaggttcatctcactagggagtgccagacagtgggcgcaggacagtgggtgcagcacactgtgtgcgagccgaagcagggcgaggcattgcctcacttgggaagcgcaaggggtcagggagttccctttcctagtcaaagaaaggggtgacagacaatacctggaaaatcaggtcactcccacccaaatactgcgcttttcccacgggctaaaaaaacggcacaccaggagattacatcccacacatggcttggagggtcctacgcccacagagtctcgctgattgctagcacagcagtctgagatcaaactgcaaggtggcagcgaggctgggggagaggcgcccaccattgcccaggcttgcttacgtaaacaaagcagccaggaagctcaaactgggtggagcccaccacagctcaaggaggcctgcctgcctctgtaggctccacctctgggggcagggcacagacaaacaaaaagacagcagtgacctctgcagacttaaatgtccctgtctgacagctttgaagagagcagtggttctcccagcatgcagctggagatctgagaatgggcagagtgcctcctcaagtgggtccctgacccctgacccccgagcagcctaactgggaggcacccaccagtagggtcagactgacaccacacacggccaagtactcctctgagacaaaacttccagaggaaccatcagacagcatcatttgcggttcacgaaaatccgctgttctgcagacaccgctactgatacccaggcaaacagggtctggagtggacctctagcaaactccaacagacctgcagctgagggtcctgtctcttagaaggaaaactaacaaacagaaaggacatccacacccaaaacccatctgtacatcaccatcatcaaagatcaaaagtagataaaaccacaaagatggggaaaatcagagcagaaaaactggaaactctaaacagcagagcccctctcctcctccaaaggaacgcagttcctcaccagcaatggaacaaagctggacgaagaatgactttgacgagttgagagaagaaggcttcagacaatcaaactactccgagcttcaggagaaaattcaaaccaaaggcaaagaagttgaaaactttgaaaaaaatttagacgaacgtatagctagaataaccaatacagagaagtccttaaaggagctgatggagctgaaagccaaggcttgagaactacgtgaagaatgcagaagcctcaggagccaatgcgatcaactggaagaaagggtatcagtgatggaagatgaaatgaatgaaatgaagcgagaagggaagtttagagaaaaaagaataaaaagaaacgaacaaagcctccaagaaatatgggactatgtgaaaagaccaaatctatgtcggattggtgtacctcaaagtgatggggagaatggaaccaagttggaaaacactctgcaggatattatccaggagaacttccccaatctagcaaggcaggccaacattcagatacaggaaacacagagaacgccacaaagatactcctcaagaagcacacctccaagacgcataattgtcagattcaccaaagttgaaatgaaggaaaaaatgttaagggcagccagagagaaaggttgggttacctacaaagggaagcccatcagactaacagcagatctcttggcagaaactctacaagccagaagataatgggggccaatattcaacattcttaaagaaaagaattttcaacccagaatttcatatccagccaaactaagcttcataagtgaaggagaaataaaatcctttacagacaagcaaatgctgagagattttgtcaccaccaggcctaaaagagctccagaaggaagcactaaatatggaaaggaacaaccagtaccaaccactgcaaaaacatgccaaattgtaaagaccatcgatgctaggaagagaccgcatcaactaatgagcaaaataaccagctgacatcataatgacaggatcaacttcacacataacaatattaactttaaatgtaaatagagtaaatgctccaattaaaagacacagactggcaaattggataaagggtcaagacccatcagtgtgctgtattcaggaaacccatctcacgtgcagagacacacataggctcaaaataaaaggatggaggaagatctaccaagcaaatggaaagcaaaaaaaggcaggggttgcaatcctagtctctgataaaacagactttaaaccaacaaagatcaaaagagacaaagaaggccattacataatggtaaagggatcaattcaacaagaagagctaactatactaaatatatatgcacccaatacaggagcacccagattcataaagcaagtcctgagtgacctacaaagagacttagactcccacacaataataatgggagactttaacaccccactgtcaacattagacagatcaacgagacagaaagttaacaaggatacccaggaattgaactcacctttgcaccaagcagacctaatagacatatacagaactctccaccccaaatcaacagaatatacatttttttcagcaccacaccacacctattccaaaattgaccacatagttggaagtaaagctctcctcagcaaatgtaaaagaacagaaattataacaaactgtctctcagaccacagtgcaatcaaactggaactcaggattaagaaactcattcaaaaccactcaactacatggaaactgaacaacctgctcctgaatgactactgggtacataacgaaatgaaggcagaaataaagatattctttgaaaccaacgagaacaaagacacaacataccagaatctctgggacacattcaaagcagtgtgtagagggaaatttatagcactaaatgcccacaagagaaagcaggaaagatccaaaattgacaccctaacatcacaattaaaagaactagaaaagcaagagcaaacacattcaaaagctagcagaaggcaagaaataactaaaatcagaggagaactgaaggaaatagagacacaaaaaacccttcaaaaattaatgaatccaggagctggttttttgaaaagatcaacaaaattgatagaccgctagcaagactaataaagaaaaaaagagagaagaatcaaatagatgcaataaaaaatgataaagggaatatcaccaatgatcccacagaaatacaaactaccattagagaatactacaaaaacctctacgcaaataaactagaaaatctagaagaaatggataaattcctggacacacacactctcccaagactaaaccgggaagaagttgaatctctgaatagaccaataacaggatctgaaattgtggcaataatcaatagcttaccaaccaaaaagagtccaggaccagatggattcacagccgaattctaccagaggtacaaggaggagctgctaccattccttctgaaactattccaatcaatagaaaaagagggaatcctccctaactcatttgatgaggccagcatcatcctgataccaaagccaggcagagacacaaccaaaaaagagaattttagaccaatatccttgatgaacattgatgcaaaaatcctcaataaaatactggcaaactgaatccagcagcacatcaaaaagtttatccaccatgatcaagtgggcttcatccctgggatgcaaggctggttcaatatacacaaatcaataaatgtaatcaagcatataaacagaaccgaagacaaaaaccacatgattatctcaatagatgcagaaaaggcctttgacaaaattcaacagcccttcatgctaaaaaatctcaataaattaggtattgatgggacgtatctcaaaataagaagacctatgtatgacaaacccacagccaatatcatactgaatgggcaaaaactagaatcattccgtttgaaaactggcacaagacagggatgccttctctcaccactcctagtcaacatagtgttggaagttctgaccagggcaattaagcaggagaaggaaacaaagggtattcagttaggaaaagaggaagtcaaattgtccctgtttgcagacgacatgattgtatatctagaaaaccccatcgtctcagcccaaaatctccttaagctgataagcaacttcagcaaagtctcaggatacaaaatcaatgtacaaaaatcacaagcattcttatacagcaacaacagacaaacagagagccaaatcatgagtgaactcccattcacaattgcttcaaagagaataaaatacctaggaatccaacttacaagggatgtgaaggacctcttcaaggagaactacaaaccactgctcaaggaaataaaagaggatacaaacaaatggaagaacattccatgttcatgggtcggaagaatcaatatcgtgaaaatggccatactgcccaaggtaatttaaagattcaatgccatccccatcaagctaccaatgactttcttcacagaattggaaaaaactactgtaaagttcatatggaaccaaaaaagagctcgcgttgccaaatgaatcctaagccaaaagaacaaagctggaggcatcacgctacctgacttcaaactatactacaaggctacagtaaccaaaacagcatggtactggtaccaaaacagagatatagatcaatggaacagaacagagccctcagaaataatgccacatatctacaactatctgatctttgacaaacctgagaaaaacaagcaatggggaaacgattccctatttaataaatggtgctgggaaaactggctagccctatgtagaaagctgaaactggatcccttccttacaccttatacaaaaatcaattcaagatggattaaagacttaaatgttagacctaaaaccataaaaaccctagaagaaaacctaggcattaccattcaggacataggcatgggcaaggacttcatgtctaaaccatcaaaagcaatggcaaccaaagccaaaattgacaaataggatctaattaaactaaagagcttctgcacagcaaaagaaactaccatcagagtgaacaggcaacctacaacatgggagaaaattttcacaacctactcatctgagaaagggctaatatccagaatctacaatgaactcaaacaaatttacaagaaaaaaacaaacaaccccatcaaaaagtgggcgaaggccatgaacagacacttctcaaaagaagacatttatgcagccaaaaaacacatgaaaaaatgctcaccatcactggccatcagaggaatgcaaatcaaaaccacaatgagataccatctcacaccagttagaaaggcaatcattaaaaagtcaggaaacaacaggtgctggagaggatgtggagaaataggaacacttttacactgttggtgggactgtaaactagttcaaccattgtggaagtcagtgtggcgattcctcagggatctagaactagaaataccatttgacccagccatcccattactgggtatatacccaaaggactataaatcatgctgctataaagacacatgcacacgtatgtttattgtggcactattcaaaatagcaaagacttggaaccaacccaaatgtccaacaatgatagactggattaagaaaatgtggcacatatacaccatggaataataagcagacataaaaaatgatgagttcacgtcctttgtagggacaaggatgaaattggaaatcatcattctcagtaaactatcgcaaggacaaaaaaccaaacaccgcatattctcactcataggtgggaactgaacaatgagaacacatggacacaggaaggggaacatcacactctggggactgttgtgaggtgaggggacgggggagggatagcattaggagatatacctaatgctaaatgatgagttaatgggtgcagcacaccagcatggcacatgtatacatatgtaactaacctgcacattgtgcacatgtaccctaaaacttaaagtataataataattaaaaaaaaattaaaaacctattcttttggttgggtggttgcttttctggaatgagcgaagtggtactcaaatgccaaagctatttgaaggaaataaaaactatttggctaagacttcagaggcacagtcaacaaaaacgaaaatagtcaaatgggactatattaaactaaaaagtttctgtacagaaaagaaaacaatcaacagtgtgaagagacaacctgtagaatgggagaaaatatttgcaaactattcacctgacaatggactaatatccagaatatacaaggaactcaaacaattcaacagaaaaaaacaaataaggtgattcaaaagtgggcaaaatatctgaatagacacttttcaaaagacttgcaaatggccaacaggtatatgagaaaatgctgaacatcactaatcatcaaaaccacaatgagatattatctcaccccagttagaatggccattatgaaaaagaaaaaataacaaatgatggcaaagatgcagagaaaaggcaacttttatacattgttggtgcaaatgtaaattagtatagccattatggaaaacaatctggaaatttctttaaaaactaaaaatagaactaacatatgatgtagcaatcccattactgggtatctatccaaaggaaaggaaaccaatatatcagagggatacctctaccatcatgtttattgcggcactacttataacagctaagatatggaatcaaccttaatgtctaccaacagacaaatagataaagaaaatgtggtatatacacacaatgaaatactattcagccacaaaaagataatgaaatcctgtcattctcagcaatgtggatgaacctggaggatattatgttaagtgaaataagtcaggcacagaaagataaataccgcacattctcactcataagagggagctaaaataaaaaattcagctcatggtagtaaagtagaattgtgggtattagagattgggaaggatgggggaagaggaggatgggaaggagttggttaacagatataaaattatagctagatgagaggaatgagttctggtgttctgtagctctgttgggtaaacatggttagctataatccattgtgtattttcaaaaactagaggagaggattttcaatgttcaaaacacaaagaaatgacaaatgtttgaggtgatgtatacgctaattaccctgatttgatcattacacattgtatacgcatattgaaatatcattctgtaccccataaatatgtacaatgattatgaatcagctaaaaaagaaaaaacctatctgaccaggatatttttggttattattatatgtcaacaataatattaatgatactataagtactgagcacaatgatccccaggaaattagtttgaacattcacccagaaaacaaaagtatcatatatttgttaaacatcttacctagaaattctttatttggaaatattcctgggcattatacaatgttgaagatacacatttattagtcatcatcattggaatggttttcactacgatgtcctattaagagcaaatattctggacatacatcttcccccatttaactaattagcataagaattaaaatataaattttatatatttcactcatctcttatagtagcatgcatttttccagatgggtatatctgtgattaatctattcagtcacacaggaatgttactaggttttctacaaagacatataataaagaaaaatataccttgtgataaagtaaataaaaatgatgttatttaatacaataaaaacctaaagttaataaaattattagttttgttctcatttgatatgggaatgacaaatactttattcccagactattttatccttttataaagatttttgtctttgccaaacatctagatttaattcatgatttgaaccttaacagttatttaatttaacttacttgattaaaagctatttttatctcatcttaatgttttgatatctgcatcgattatatggcttttaaaaaaaacctgacttatggaaaattcctgaccctaaagttggtttcttcatgctttacaagtagaatccaaatgaaccaggtaaagccttcaatcaatccagctgcctcaggaaacttcactaatagaagagctgccattatatttctgtatatttcattaaaaaactgattaattatactttttaaaaagcttgataatccaaagagtgtgtcaattttcattctgaacattattcaccaacaaaactaaatgcttatgtgcccaatttcagacatcataaccaatgtattattccttttacttttgacatcttctccatggagtgagtaaccactactgttttgaactgtgtggggtcgtatggggttgtattatacaaaatttataaaaacagtatgataaacaacatgactcacttctggtttagtatcatgttatttggtcaccttgattccataaggaccatccgaactttcagtcacaacttgaatgacttattttattgggtattctacttagtcaaaatagcatatgcctgatctcattattttgaaaactatacttcagggcaaacttaacactaaactctggctaagaggtaactaagaaatgttactttggtcttgtcataaaaccatctgaatagattctctcctcaaggtcactctctcaggagggccataacaccctctgccgactatgagtcaaccgaggatccttagttcctggctatatcctacactatacaaggtccaagtagagaacacagaggagaatggctctgggatctttaatccaagaaaagagaagaaggtaactttatttttgcctcattctgtaacgccatccaaaatttccagaagagagaaggttcatgagggttctgcttctgtttgccctgagttatccacaagctgctttcaagggtgagggttgggcatccaatccagggagatgagacgtacgtcaacttcatttgaagaggatgttccatgggcttactttgaattattgtatgaaaaagtccagtcatgtactttttagcctccataataatataaaattttatactccaataatcagggcctctgtcactttcacattatgcattaaataatgtaactctgtgttcaccatttaaaagaagggcaagtcctaagcaggagagtcaagttggcatcatgccccctccatcctatcacctccttccttaagaaaatagaagaaacttaagaaactgtaacttttttgaacataataaataccataaacttatttgagatcaacaatatgcaagattgagaaggatgcaacaaagatcacaaaagtgaacacagatggactttaccctcaagaagcttttaaaatcaccttttccttaacccttacattgccatcattttagtctttgtgttgctccctattaaggaatcatggcagcttctcacctaggggtcacgtggaggcctcggagctggacatttcctaacatgcctcccttcatcctaccatagttgctcaccatgtgtccagtcctttgggggccatacatggttacagaccccctgagtctctatgttcccccatgacattggaagaaatattgttctcctgatagaaggtcagttcctaaatctgttctcttcgacccattcacttctgcctagccagagaccttgccataacaatcagctcttatctctcttgtgtcttcaaccactccctctaagttggctcttttacatgagcatttaaatgtactcacagtattaaacaacaagaacaaaaaaaatttctcccttgaccctataacgtctagaggccacctaaaactgccaggtttacaggtgatccctcacagcaccagtagtacctccacatagttcaactccaaagatatgcctggttgtccaaaaattgttctgcaacatggtggcaatatttactggaatgtagagtggcagtacctaataacagtggaaaatgtttaactaaactctgttgaaataaattatacaaccaaagctatgatataagaaatgggtaacctatgtggataataaagttgatgctccacccgattcggtgaatctcacattttcatagtaactagtagtatttcatagactcagtacacaatggatgttcacattaggtattaactgatatcacttgtaaatgatatccatgtatttatttttacaagatggcaacttagtttttaaaatataagtgaagtggtagggcaatcatgttttaaatgtaataaaacatctgtatcggtacttagaaaatataaagcattattgaaaaaaattctctcacttgtaattggtcattatgtgctttctaaagttttaatggctaagactatctaattcagattagtcaaatgcagaataaagacatcctcaatttacttgaccctgcagaacctcacaaaatacaatcagcatctctcaggaaatatgttgtttcagagctggaggtcaagacattatgatgagtacaaaccagagaacataattactgaatctggttcccaatggtggacaggatatactaaagaaaaaccaaatgattcattccacaagtttatccctgatgttgccccaaaatgctttgctttacatgaagtaaaaatctcaccaggctgcaaaggaactctcatccatcatcactttgcttgttaaatcttactgaaataacatagaatgtcacagtggatgagaaacaataagtaaggcaatattaccactttaaaaatccatacttcaggctgataaagacattatatgtatatgtgtgtataaatacatataactatgtgtgtatgtatgtgtgtgtatatatatatgtatgaataagctctacacatataatcacatagattagatagatacatggatggatggatggatggatggatggatggatggatggctagataatacttaggatgcctcacaacagttcctaaaagccattatatagaaaaaaacggacagtattcagtagattgaagtggcagatcatattttctattaccagaaatctacacagtccagagatattttgaaaaaacttccccagtgtactgacagaatgtggttctcctattcttgtgtggggtacactgttaacataaaagaatttccaaggtctccctctggaagtagccatctttgtgtgtcaccgtcctttaattgatccatttcataggcagtgctggaatggttatgagtcactgctgtgtttggcatcaccagggtaagattcgccaccatgttccttcctcatcatgaggtctctgagtgaatctgacacagaaacaccttcagggtgtcatgaacaaaaaattaattgcatttattatcataatggactatgtaagaaggtcattgaagacaccaaataatgaggataattatttttaaaaaactagtaattttgagcacctactatgtaccagatacagggcaaagaactatatgttcactatcttgtgtctttcacaatataatgctataatctatgtattatctctatttttcagtgagaagcctggatttacacagcttaaataaaacactcaaattaaacagccagttagtgacagaattgctatttaaattcacgactctttgtgtattttttctctgtatttccagattcaggctgtttagtcacttgagatctagaaataagggtactaggtagacacaattccattgtattataataccaacatcaatataatattcagtgcttttaaaaaagaatatgtttcttcttaggtgaaataagtgaattattgaccagtttactgattcagtaactgaatcacatactcattcacataagattttacgtgaatggaggggaaaggagtaacctagatcttgctgttgtgtgctcaattctttgctcacaacttagtatagaagatttaagttggaggttatgctttgtagtaaacaacattatttacagataagacatgaaactattaaagaatggctcctgccacaatgcttggactacgtatctttaactcatctccagaaaggtcttctacatagcatgagtcccagcctggttgtcataattcaagtctatgggagggcaaacgatggattatagtgagggcctgagaaacagcacagaatccacagtctctcttacatcttcagcagccatgtgcaacacagaccaacctagatggtgttgtgcatgtgaacttttgcccacagacaaaaggttgagacccagagttctataggaggagcaatagcatataaaaattacatagatttaattctgagcttccaaagatgttaataagggtaacccccttatgcctactgacaccccccattgccatatagtgccaccagtacaacataatcctttggaagtctcccattctaaagccactcataacagaaatttgaccaacgtgttgtcccagataaagagcagaggagaaaatgtacattcttaattctgtcagctttataaatacctcataatgcagaaactgatagtctataattaggttaattatttatgggaaaataattgggttaatgagatatttctttatgggaaaattcggttggtgctgctaaatagaaaaaaaaatcaaagatcttaaagacatcagaaacgagagcaggaaaaaattaaattcttacatttgggaaattgcaaactcattgcccataggaaatgacatctggaatgcaaaaataatatattataatcaactgaacaccagtttgcatctatcatgttaataagtatagctacctatgcagaacggtataaagcaagcaacatttttgttaatccctttgcaacaacccattcaaaagatctgagattatgagatctgaataaaacaccttactttcataagctaatgttagctatacttagattttttctgcaaaaattattatgaagaagaaaaataatttgacattacccaaaattgcatatttctaaaaaaaaaaatatttccttccaactcttatccacaacataagtaattttaaataattataattatagtgttgatataactttatattctccttttcagttaatgttgtattttgttttggcattaaattatttaagagtaactaacactttttccaaacaaaggaatggttctagtaacaacagccatattgatctgtcattttttcacttttatcccttaagagctatgaatccattttctcctataaggcctactggccctttgtttttctttagtatctttagatactagatatattccagattaccactcacaagtctatatcaaacacattcctgataaactcaaccctacacttaaagttttcactttcttttctttatcctaccacctcaaaaacataatgccaacattttataaatcagctcatattagactacaatctataaatatgcaactattaccttccctttatattccctttttaagagaattaattaactacaataaaatatgaatgtactgtcttacttcatggccctgaaatttgatttatattaactctaaagagaccctgatcccacaacacatgatccatcatcaatcatcaccttactcctcgccatcttgaatagttactattctttctggttcctttccttttctcaccatacatgaagagaagacctctggctcataaaaatattctactctgattacccctgcagctaccaaccctctttcctttttgctactaaacacaaacacacacacatacacacacacacacacaccacagagagactgttgaacctttgatgacttcatttcttcatctcttaatcatttcttccaccccctcaatctgacttctgttcacaccactctgctgaaatctctcacaaagatgacatgagcaccaacttgccaaacaattgatcttttctttatcttcatgttgtttgacatttgtatatcttgtggcaatttaaccacattctcctgaaaatcactccttttgttgttgttgtttctaggccactgcatagatttcaagtttcctatcagctctgttgactgtcttttctctattttctaaaagtgagcattacccaaacaagtttctgtcattaactctcatagtttcttactttaagcagtcctatcctgaactgatcactgcaagagactcagtcaacccatttccctaggcggcttatctggtgacctctggctccttgagactgtttaagttgaggtttacttatgctgactgtcatgcttccgcttttgttccagttactctacttcacacttgagggtttgatgaagtttttctcaggaatcccatgcacttgcttttcttgaatgcttttcaatttgtgcctgggtttttaagctgatggtttctttcctcagcttggtcctccaggcactatatatggcagatatacgtcacagtttttgacctctgcatggaaacctttcctgtttttcaggatggatgtaggttgtgtgtgtgtgtgtgtgtgtgtgtgtgtgtgtgtttactgagaatctgcaataaataaataaataaaacatgtgggctcaaatggccattcagaattgaaattccacctcttactttccaactatcctacttttgaccatttttgcctgacacttacatcaattccacagccactagatcagtgtttctcaaacaacctgcattatcatcttcaagagtggtgtttatgaaaatgcagctcactgccttttaaatccatttccactgaaacaaaatctctgaagacggagtcctggtatgaagccctcccaggatattataacatgtttccccaagagattctgatacacactaaagttggagaaccacagcaccagactgtaagacccctaaagtgagtgcactcaaggtctgtgcatgctctactatccaggaactacacacacaggcccaactgattcttcctgaaacatggtctgaagctcatggcaaactcctggtacaaaaaattattactaccaacagcaagataaagtccttaaaccttgttggtctgccctttaaggtattccacaatctgactttcatccatcattttagccttatcaccagttacttgatgatattaaccttatgctcacatgttccacctgtgattgagaggccttggttaacgttcatatgaaaactatgatggacactattcatataatagtttacaatttgactgaacacctaagaaagttctgtaagtttcaggaactcacaaaaatcaatgagcaagtaactgtaaaccaaatatgagccttctgagagcatgccttctctgtaaccaaaggctggatatctttcctccagtgaatgtgcttgctgaagcagagattcaaataaagaattgaaataatccttacaggctttcaccttgttggattgcatgatgtttggaaaatggttgtcctctggaattagattttctggatttaaatctcagctccttcattgaccttggataagttacttaatcccttggcttcagtttcttcatttattataaggacataatgagaagacttaactcataaggctgtttggggaattaatgagttaatagatatgaaacatataggacaatgcctaacacacatagtaagtatatgtggtacacacactcatactcacactcacacatgcatatacataagtgggtatgagaaatattaaacttttatatttaagaaatttaaaatactaggggtacattcagatgtaaataaaaatctgtgactcagaaagtttggtctttggtcattcaagaagagatttgggtgtcatcagtatatacatgggacctgaagccacagattcatatgagctcacactgagagatgtaaaggtaaagaatatgagaaacttcaggatagaagctaaaaacagaaacttagtggacttggcacttcatcaattatttccaagcattctttacaggtctaaaagaataatctacaagcacagaaaaacatcttcttatggaaaaaagcattgttatgcattccagaggttacatgtagagccatgaaaattatttatactattgctttttttagctgttcatcaaattcttctccaatatgtccattgcattagaacaaattcatgttttcaagacaagtgaagcagagcttactgtactttgtgaagagcatagatgcactaacaggagaggtagtgggtctgagtaactccagataggagttagttgctacaaactttgtgtacctatggaggatgcttaccatgtgctcaaagtgaggaggtccacttggcagaagggcaggaagccacatatgttgcaccaaggtattgacaatgcaaggacagctcttcagaaacaagagctgtgtagacagtgggtgatctgcagagtcagactcacataccttttaagtgggcattctctagagtaactcttcccctgggataatgatgggaaagaaccctgcagaacttcactcccatggacagtcttgtgtcaggtgggcagctgggttttgaggtttggtttggcccataaagctgtccagttcctaagagagtattgcagccctgctcatgtattatatacctatattactgcctggcgaagtttatactcccacatcttcccaccacatcttcctactcattgctgcatcaacctgcagcaacggttgggttgcctagtaatggcttttacccactgcgatagttaacactgagtgtcaacttgattagattgaaggatgcaaagtattgatcctgggtgtgtctgtgagggtgttgccaaaggagattaacatttgagtcagtgggctgggaaaggcagacccacccttaatctgagtgggcactatctaatcagctaccagcacagctagaatataaagcaggcagaagaatgtgaaaacatgagactggcctagactcccactctacatctttctcccatgctggatgcttcctgcccttgaaaattggactccaagttcagttttgggactcggaatggctctccttgttcctcagcttgcagaaggcctattgtgggaccatgtgatcatgtgagttaatactatatatatataggatatataggagatatatatatatatatctcctattagttttgtccctctagagaaccctgactaacacacccactttaggggatgaggaataagatgcatttttaaaagcccagaaaaggtagggaaattctcagcaagtgttacttttagaggaattatttctaactcatagaataaccttgtattagtctgttttcatgtggcgataaagacatacccaagactgggaagaaaaagaggtttaattggacttacacttccatgtgtctggggaggcctcacaatcatggcaggaggcaaaaggcacttcttacaagttggtggcaagagaaaatgaggaagatacaaaagtggaaacccctgataaaaccatcagatcttgtgagacttattcacgaccacgagaacagtgtggaggaaactgccccatgattctaattatctcccaccaaatgcctcccacaacatgtgggaattatgggagtacaattcaagatgagatttgggtggggacacggagctaaaccatataattcccccctgggccctccaaatctcacgtcctcacatttcaaaaccaatcatgccttcccaatagtccctgaaagtcttaactcatttcagcattaacccaaaagtcaacagtccaaagtctcatctgagacaaggcaagttccttccacctatgagcccgtaaaatcaaaagcaagctagttacttcctagagacaatgcaggtacaggtagtgggtaaatgcagccattccaaatgggagaaattggccaaaacgaagtggttacagggcccatgcaagctcaaaatccagcagggcagtcaaattttagagccccaaaatgatctcctttgactccatgtctcacatccaggtcacattgatgcaagaggtgggttcccatggtcttgggcacctctgctgctttggttttgcagggtgcagcctcccactggctgctttcatgggctggcgttgagtatctgtggcttttccaggcacatgcttcaagctgtcattggatctaccattctggggtctgaaggctgtggccctcttctcatagctccactaggcagtgccccagtagggactctgtgtggaggctccaaccccacatttcccttccacacttccctagcagaggttttccatgagggccctgcccctgcagcaaacttctgcctgggcatccaggcatttccatacatcttctgaaatataggcggaggttcccgaacttcaattcttgacttctgtgcatctgcaggctgaacaccacatggaagatgccaaggcttagggctgctgccctctgaagccatagcacgagctgtactttggccccttttagtcacagctggagtggctgggatgcagggcacctggtcactagactgcacacagcacggggaccctgggcctggcccacaaaaccattttctcctaggcttccaggcctgtgatgggaggggctgctgtgaagacctctgagatactctggagacattttcctcatcgtcttgaaggcttaacattcggcctctcgttacttatgcaaatttctgcagccagcttcaatttctcctcagaaaataggtttttcttttctatcacattgtcaggctacaaaattttttaaacttttctgctctgcttctcttataaaactgagtgcctttaacagcactcaagtcacctcttgaatactttgctgcttagaaatttcttccaccagataccctaaatcatctctcaagttcaaagttccacaaatttctagggcatggcaaaatgctgtgagtctctttgctaaaacataataagaatcacctttgctacagttcccaacaagttccttatctccatctgagagcacctcagcttggatcttattgtccatattgctagcaggctttgggtcaaagccatttaacaagtctctaggaagctccatactttcccacattattctgtcttcttctgagctctccaaactgtttcaacctctgcctgttgggcaattccaaagtcgcttccacatttcaggtatcttttcatcaacactccactctattggtaccaatttactgtattagtccattttcacattgcttataaagacatacccgagactgggaagaaaaagtggtttaattggacttacacttccacatggctgggaaggcctcacaattatggcaggaggcaaaaggtacttcttacacgtcagtggcaagagaaaatgaggaagatgcaaaagcagaaacccctgataaaaccatcagatcttgtgacacttattcactaccatgagagcagtatgggggaaagtttaccccatgattcaaattatctcccaccgagtccctcccacaacatttgggaattatgggagtacaattcaagatgagatttgggtggggacacagagccaaaccgtatcaaacctcaatgtcaaagtcttcttgatatgcagtgaccagggaaagaaggaacagatgttaaatacatgaggaattttccagttattttataaataaatatacctaatgacaggaagaaaaccctaatttccagtcccatttgacctttctcattttactctgaagccattagatcagcatttgaatttgaccacaaaataaaatgtggctaagcaaaagcactataaaattccaaataaattaaacaattaccccacaaccaaataatactgcatggaaatctttcactttgataattaagaggtaaaattaaaatattacatgataatatcccagtacaaatggtcgcattttcaaattcccatggtggtacaatatatttatcatttatcaaaatttgaacgtaacacttaattatataattaaactatggggtcttatataaagaaactattgggtctgattggccctagtctattttgaaacatcataatgcatataacatctttttagtttaattttccaaaattagttttatttaatactatgacaattgccaagttggtatctgtttttcccatgttctttgtgattgttttaataaaatgctccccctaacctcaactgtctaagtactcagaacttcctcagattatttcttacaatatttcagctctcagggctgtccagaaatattactacatcttcctagttcattcacactcctgcttacagatgattatttcacaactctccttaaatttttaacagcttctgctctatcctcacactcagttgatagcctatttctttgaaaaaaataatagcaaatcagaaaacaatttttctctgcagcccccatcacatttatcaaatcctccatttatgtgcctgatatcatctcttttctcctcttcaagtatatcactccagttattactgtctctgttgcatcactaatttcctcctcttctctggattcttcccatttacatagcaacctgccataatatgtccaatttaagtcttaactactatatatcttatttctctgcctaaattctttaaagtaaaactcctcaaaagagttttccaaactcatgatattcagttcttgccctcccaccatttcttcttgaatgtactcctatgtttttgtttatagtactccactgaaacagctcttctcaagatcatccaaggtcttctcagtgctaaattcatttgtcaattctcagttctcacttaagtaatcagcagcattcacaattaatcatgcattcctttgtaaaacactatcttcattgacttccaagcctttcctcactctaggttgtatttctgcctcaccagctgctccttctcaaaagctccatttccttttgaatttccaacttcaaaacattagagtggcttttcctatttatctatggtaactcctcagttttaaaatcatcaatacccaaattagatttgtaaaaccaacctgaactcaagactaccataaccaactgcctatctttccactgatatatctgaatgaatgtaccaaatttaacatgaaaatcttgatctctccctttccatttcagtaaacagtatctctatttgcacagtttctcagaccagaatttatatagtcatttttgactttccttttccttgcaactgatctcaatcaagcagcaaacttgtgaaatctaccttagaaatatatccagatcttatctttctcaccgtaaacacagctaccaccctagtccaagccatcataatctcctgcctggaatactgcatttatcttctatagtagatgctactgacggtcttctcagatcccctttattgggcaggtacacccatcttccagaggttgtactgactgctaaacagctcatagctgtactcctgcagaaatgtctttgaaagacccaagcggggagacaaagagagaaagacagagagagagagagagaagagtgattcaattagatagatagataattatttattacctatctttcagaatgtaagctctgtgaggatagaaatgttatttgttcactgataaattcccagtacctagaagaatttctggtacacaattggaatcaaaatatatttgctgaattaaggaatcatctagtttatcctgctcaatgctcaccttatcttggctctctgccaatatccaaatgagaaacagaatttcatttacggaaaaggtaagtgctcagaattaaatgttaaagaccgtcttcctaaataagaagatgagggctatggttttgctattttgagttaaaagagccctttaatatcccaaatatcctagcctgaaagaagcaatagtttgagaaagagaaatagttgggggcatggttcttttgagttaaaagggcgtttgactatgattttacctccattagcttcagaagatttggtgctcaatttaataaagcttcaagaacagcctaaattgtaatacatattcaacatttgactcgaatagtgaattgcatctatcagatcatccagacatttagagttttgctaaaaaaaaaaaaaaggttgttgacttactctcccaaatccagctatcttcagacaataaaaaccaaacttaaacccgaggtcattagcacaagtcacagatgccaaaacaacactctaaatatcaagcagaaaatattttacttttattctgccataatctacttattttttttcatagtaagtgctgaagattacatagaaattttattacatagattttttatctgagtatttattaccacttctaccaaatctttgttcctttagaaacaaacagatggctaaaaaatgaaatgggaataaattaacttgatatgttcaaggcagtcttaatatatcaataaaaaccctccttctaaatagcaaccttatgtgtctgtctgaaacaaaatggcacacttgtattttttattgggagtcaaactgggctggccaacaaggcaattttgtgaaatatgtctttcaaatgaatatatttaaacactagccattaacagccacttcaactaaataaatacttatttagactctctctgtgctaggtggtagggtagggcttaagattaaaaaacgaggagctgccgagaacaaagatgcttattggattcaattgtgtgtgagacattgttctaggtactactgatgcagtgatgagcaaatagacattattcagtgaataaaagagactaacaatttaatcacatttacattaaattatacatttactcatatctgataagtacagtgaaagaagtatgcagcgtatgtatacttctgcagcatatatagaagatagttctgacaatataacagtccagagaagtcttctaaactgaagtgaatttacaaagatgggaaggatgaggagggattcactaggtaaaggggagagaaaagcagaagcatgtgttcctggcagagagaacagcatgagaaagtgccctgaggcactgggtggaaagtcggtgtacaagaagctgagggagtgaaacaggcaggggatacttcaggataaggcagaaaggaggctggagacaaggtgtgattcagattattgagcccctggacaatcacacaaaaatgacgttaatagtcttaagaacaatgggaaaccgctaactggttttaaggcaagggtgtgtggtgagtgataaggttggacttctgtttcaaacaggtgactgactgcaatatggagaacagattggatgaggggcaagagcagatgccaggaaatggatcaaggcagctatcactgtggttcaggaaacaggtaatgccagcacagacaggccggccccgggaaagatgaagagagagggatagatgcagcgcataactggaaggtgaaatcgacaggccttagtgatagggtacttacagcaactgagggaggaagatgaaggtgaagaattggatgactgttgatattcatagttttaagggccacaagagaaaaatcaggtcgcagtaagcaggctgtgaggggaaaacagaatttcagttttggatattttggatctaaaatgcctctgaaacactcaatggaagatattgaaaaagcggtaggatatacaggtctgagttccagaggacaaatatgggctgaatatacaaattggcgagtccttagtatataagtgatcattgaaatcagaggcatgggaagtatagtgtaaggcaataaaaaggaggaccacgcctgaggcattgccaacacttaatggtcaaatagaagttaaaagggagataaagaaggagaagccagagatgaaagaggaaaactgggagatagttgcaatactgaaccaaggaagaggtcctgtgaggacatggtagcagggagagactatgtccaagtagtaagattaggaatgagtttacttcttacctagaagttggaaaagatctgcaataaggcatattaaactcctgagattgggataacttatccaaaactgtaaccctaagtcagtaaagatgatcttgggatgtatcagtcaagaagtctacagaataatactgtccaaaagaaacagacatatgttataaatataatatggatgcaacacatttgttttaaggattacaaaaagaaattgatttggatagagtgcagtatcatctgaccttaagcagcgagtggcagagagtcaatgaaattcattccttcttccctgggcccatagctagaccacatttcttttgtatagacatgtagatgtaaggtaaatggaagcaacataagccacttctgggcctgctcataggaaacatctctgggttccctattcacatactgatgggagagaagtctgaagtttgagaggaaaatgaagccacaggtgcataggaagaaacccaggtgtctgggtgaccaggtggaaggcagctggtgaaccagaaacatcaactgacttagcatgaatgagagataaacttcaattgtttgagcaactgggatttgggtatttatctgttacaacagttagtattaactactctaactgatacactgaagctggctacgttggaagcaactcagaggggcagcatttatctcacagaccatgatcaccttttatctctcattgattcactagtgaaccatatttctatgatacagacagaatgatcaaaaccaaatagcagttaatttgctacgatgcattttcttaaatctgaatgggttagaataattcaaggtggttctgttttcctgtcaaacagtataatgttttcaagtaaattacagttaagccatgccttaacagaggagaaaaacaaagttctatgttatttctttgattgacagtttattaaaaagcaaactcaaattttgtcatcaatattgtgttacagtgatttaaatagtaattaagcaaaatgtagttctctcaaattgaaacagaaaactccagatttttaaaatatgtgctttttgcttagaacagcactaaaatttatttaaaatatgtgtttttatataacaacatgcaagtgctcatatgacagcttggcagagatgccgaggaatctttatagaaaacctggtatgcatatttcatatgcttaatcataacttcttctttaagtctttggaggaggaaacaaagggccaacaatggtataataatggaacttgaaaagttctacaggtagagagaagaggcaggaaaaaagaaatgtcaaatgcatgaaagtattattaacatgattgagaatttctctgggttctcaacatctttcaggtttaatttcagtatctgatcagtaatttgatgactgcaacttaatttttagctctctcccaggtaggaccagctacatgatgtaagagcccatctaggtgtggaacccatgtgaatgtatagtttgtatatccatgaagctgggcctgcactcatgtcactctcaaaacaacaacaaaaaatttcaaaataccatagacctgaggccaagtttcaagtgtgatgaatggaaatatttgattgctgctgttagagtttttgtattaactgtagccattaatcaatgttgtcctataaaaactctattgaagtataagatcttaggtttcctgactttcttttttattgtgtcatatagataatcaaaatgtagctagaacagaaaggtctctaaagcaaaatgatgcaatattctttttgaccttgctgcagcctgaatgtattcccccaaaactcatctgctgaaacctaatcaccaatgtgatgatattagaaggtagggcctggggggtgattatatcatgaaggaggaaccttcatgaatgaaattagtgcccttataaaagaggccccagagacctgacttgtctccttccaccatgtgaggacacaggtagaatgcaccatctataagccagaaagtgggccctcatcagacaccaaatttgctggtgctttgaccttggccttcccagcttccagaactgtgagaaataaatttctgatacttataactacctagtctatggcattttgttgtagcagctcaaatggacttagacagctctaaacttagactgcacaaaacaggatggtgtgcactgctgattgagatgggttcctattctagagattaccaaatattggcaagcttacagtagaaaagtatcctggtgagaaaaaagttactggaatttctcaggcaagttcaaaggacatattttttcatgtgagatgcccaatctgtctccatgggcaggagaggacacatttccttgacagtctttgtagatgagagtgataagagagattagatttctaagacagggctatgtctataaacagagaccatccttttatttgctttcccatgaactcaactgattccactgcacaaagtcataggcaggatggcaagagactcttaaaaacagctttgtggtatctgcaaaaagtaaagggtgatgacttgcactgtcactgaacatccactgagcctctagaccagcttacttgtcttggggctactatcatggggaaagagtattagtaaaagatgacacagtggtttggctaaatagagtcaagacacagaccatcacattgagctttaaatttcaaagatgtaaaagatatgtctgtgcctatgggtcccaggttggtgttttaatattgttaagtttgaaaacatttacactgatacacagttaagacttatatgacttgtctatggagcaattctaaagttgaaaactataaacagggttttcatttttatgactatgtaaagattattttctgcaaagtgaaatagttaagattacatttccttttctctgattcctatgtcagaattagtaggccactcagagaaggatgtttctagcatcaatttacaccctcaaggttttccaaaacctcattcacactctctaatctattaatatactctttccaagagattttcctaaatatattttatctattttctttcatttaatgttttcattaaataaactttgttttgctttgttttcgcttctgttgaagtgatggtaaatacctggcttcatgccacgtattctagtatggggctgagaacagatgtggtaagtagagaaggataaagctgggccctctacattgtgttagacccacaaatgctcaagatttataccttccctgtatccacccttttgcaatgtgactttgtagttcttctcatcaacaaataacagtctgttgcgatatcctttgaatctggactggtcttataacctagtcaagcaatgcaagaatgaagttaatgtgtgccaattctaaacctagactttaagagatcttgcgtttatattatttctcttataatcctgctcctctactaagtgacaatcccaaactagtctgatgagatttgcaaggcctagtggcccctatcttgctaactgacacccaaccaacctgcagaagcagagctgatcaactgattggttgagcaaagacacaggaatatgcccatataagcccagccaaaatggctgactaggcagaatagtaaactaaataaatggttgttttaagccattatgatttaaagtggctcattgggcagcaaaaactagtgcacatgctcttgatcaaaatgctgattacatctatgtttctcatttcaatgtccatcagcattggcttatctgaaactggagccttgttagcttctgccatgttattagggcttcttcttgggtgtagctccctctacaaatattctctgcaataattgactttgttttgcttcagtaatcaacaccactcactcatatttcatcttccagaaattcgataaaatctcttaccactgatggccttttccccattctctttattgttgtgcattatacagatttagtttttctactattttaatgggtattaggaaaagtaaaggaaaacaaaaaccatgtgttctgtcaacatcttgaactaagttaatgagtatttattgagcacctattgcatgtaggctatataaaatattagaaacaacatttgtttataaataatgttaaaaagcattcattttagaaaagcatgcttcctaaatttcatactcaggaaaatttgttagtgtaatccctgtatattttagaaattaatttaactgtttttatttaaaaattgttttcacacttttattgcatattcatttatgtattaccgtattccagaaagaatttacatgttggtttttgaactaatctagacaacttcttccctcattgttaacgaatggtaaatttaactataattatatttcagtaaaaaataatagaatcagtatattgtaaatacccaattatttggtgtaagtagtgattaaagaaaaccagacaatcatactcagtcattcatgcattagatactttgtattgacaatacacaagatactttctggtaaaatagatgaggacatggttaaaagagcatatttttattcataatataaatattatcaaaggcacaaattttagtattggacagttcactatggttacatttaaaatattactcaagtagggaggctgaggcaggagaatcgcttgaacccaggaggcggaggttgcagtgagccgagatcgcaccactgcactccagcctgggcaatagagcgagactatacctcgagaaaaaaaaaattactcaagtaaattttgtgttcattgtgaataaatgcatgacatgggtaaaggcactttcaggcatatccctgttgtctaaatgaaataggaaattactatacactctgttccaaaccatagtgtagtccattgcctctctcttcaggttgtgttccacttccaccagatgaagagctaaataataaaagctcatgtttccacataaaaaggcatcaaagtccaatttctggctctgctataaactgtgtaacctggagtaagtcacctaacttctttgagttctcagtgtcctcatatctatcaaataaagaggatgaacaaggtgatctctaattctctcaccaatctctctcctacattattatcaaaatattctccaattataggctttggagacacctagatatgggttagagttcatactctgccacttattgccgtcaacttatttatttatttattattaattttttttagacggggtctcgttctgttgtccagactggagtgcagtggtgtgatcttggctcattccaaactctgcctcctgggttcaagtgattctcctgcctcagcctcctgagtagctgggattgcaggctatagtcaacttctaacaaatatcaaaacctaaattgtattatctatgacacagagataacctgacgtaactatcatgaaaaaaaagacacaatgcaaaaattgctcctaacccagtgcataaaacacagcaagcactcagtagatgctagctaatattaattagtgttatactacaacatcctcaatatttttctagatgctaactggacgtttccattaacaggtagatcactactttgtgagaaaatcctttcattctaggacatcttaattattaaggctttacatacacataatacatatacttaaaatgagcttaaatctgactccttgtaactatatactctaccatttagtagtttttaacctggagtccacaaagaattcaggagattggtaaacttgtatgacaagtttacatctgtatttttactaacttgtaactgaaaaataccattttcttcaattatgaatatagttaccaaaccactgtagtttgtgactttgttgccagtaaaaatcatagataccttcttatctcattagacttcttgcaagcacttcaaaattaagtatgttagatatgtgatctgctggatcttatgatttaatacattaataaagatgcacatatataactataccaaatttttattttaatatttgtataatttgttttaatacaactggtttcatttttaattctacaattttattttgtgcttataaacattatacaggctgagtgtggtacctcctgcctgtaatcccagcactttaggaggccaaggcaggaggatcacttgaggccaggagtttgagacctacctaagtgacatctcttttgtagagaccccatctccacaaaaacaaaattttaaatgatccaggtggtggcccacacatgtggtcctaactactagggaggctgagacaggaggatcgcttgagactgcgagtttaaggctgcactgagctacaatcacaccactacagtccagcctgggtgatatagcagaccctgtctccaaaaacaaactaaaaacaacaaaaaactattatacagttgtcccacagtattcgtgggagattacttccaggacctctggcagacgccaaaatccatggatgctcaagcccctgataggaaatggcatagtgtttgcctataacccattcacatcctctcatatattttaaatcatctctagatttgttgtaatgcctagtataacgtaaatgttatgtaagtaattgttataatgtattgcttaggaaataatgacaagaaaaaaacatccgtaaatgtccagtgcaaacttttctcttaagtttttgatccatggttagttaaatcccaggatgcagaacccatgggtacagagggccaagtgtactgagaaggcattcataggtgtacccttcttactgaaaggattcaggatttacacccactccatacacacacatagaagattagtaaactctgctctgaagtaagctcacataattctactcctcctccctgacgaaactcttaaccactgaaaaacaaataagaccttggaatgctctaaatgtttgtgtcccttcaaaatgtatattctaagacctaatcactaatgtgataatattttgagatggggcacttgagatgtcattagtggccctataaaagaggtccaagagagacccttcgcccctttaaccatgtagacacaactataaggtgccaactatgaaccagaaagcacaccctcaccagacatcaaatcttctggcaccttgatcttggacttcccagcctccataactttgggagataaatttctattgttcgtaagctactgagtgtatgctattttgttataacagccagaatggataaagtcagatctaattgccagatgtctttcttttctttctgcctctacttaacatctctagttgtgcatgcctacaggcatatctcatggaagactaacgtgcaagatgagctatgaaaaaaagtagtctatcgttcaaaaatgggggaagggaaaaggaaaaaccatcgaataccagaagcagtaacaggaagggtaaaaaaagaaggtagctggatggagaagcaaagttaaaatgatttttatcagacagagcaaatgcatttgtagaaagaagttaggagccactggagaagaaaataatcaaaatagagagaagtgatgaagagaggaccatagtgctggaagaaaggtcaggggatgaaagtaaaaagtaaatagctatagaggagtgcatatcctttcaggacactaaggtgggacatttctcttcaggcttccttaatggcctcctgtcttggacagctgcaatgcatattggtatattaaagaccatgaaaagtactgctcaaaagacaccttttgcttaacaactcatcctttccaagcttctttgacaatagaccttcccttctcataataatcattaatgttctaagagctactgctctgaagaacacactctgggaaacttgtaatttttcattgtacaggatattccataggtggtctgacaattgtttgagcacaatgaactactgctacctttcttgtctgagcaataatatttcaattaatgttgattttctttccctcaagaaagattcaatttagaagatttttagatagacttatcacatatttgatacagtacttgcaattaactaccatttttatgagaatgaggtctttctgtacttgcgctactgctttttaaaatttttttcttaaagcctaaataagaaattaacctttctttcctgttagattgtgtcttgttatttctggactatcttttttttttttaatttttgagatgaagtcttgctctgttgtccaggctggagtgcactggcatgatctcagctcactgcaacctcttccttccaggtacaagtaatttctgcctcagcctcccaagtagctgggattacaggtgtctgccaccatgcccagctaatttttgtatttttagtggagtcaaggttccactatattggccaggctagtctcgaactcctgacctcaagtgatccaccctccttggcctaccaaagtgctgggtatcatgttatttttaaaccatagcattgtcacacattccttttttattatatctgctcgattcagtctgacaaagactactattaggtatccacccaatatccattcttttcttattccttgctaaacaaaaacacctatgttattggggctgggagtgtgctcagttaatataaatttttttcagattaacttgcatctagacaagttcttttcttcttactttacaactttaagttcatgggtacatgtgcgggatgtgcaggtttgttacataggtaaattgtgccatggtggtttgctgcatagatcatcccattacccaggtattaagcccagcatccattggctattctcttgatcctctccctcctctcaccctcctaccctctgaaaggccccagtgtgtattgtttccccactcccaatgtgtccatgcgttctgatcatcacttataagtgagaacatgtggtatttggttttctgttcctacattaatttgctaaggatagtggcctccagccctatctatgttcccacaaaagacaggatctcattctttatttatggctgcataattccatggtgtatatgtaccacattttctttaccaaatctgtcattgataggcatttagatgtctttgctattgtgaacagtgctgcaatgaacatacacgtgcatgtgtctttatgacagaatgatttatattcctttgggtatatacccagtaatgggacttctgggttaaatgatatttctgcctctaggtctttaaggaattgccacactgtcttccacaatagttgaactaatttacactttcaccaacagagtaaaagcattcgtttttctccataagcagcatctgttgttttttgacttcttaatcacagccattctgactggtgtgagatggtatctcattgtggttttgatttgggtttctctaaagatcagtgattttttttttcatatgtttgttggccacatgaatgtcttcttttgagaagtgtctgttcatgtattttgcccactttttaatggggttgtatttttcttgtaaatttatttaagttccttataaatgctgtatattagacctttgtcagctggatagattgcaacaattttctgccattctgtaggctgtttactctgttaatattttcttttcctgtgcagaagctctttagtttaattagatcccatttgtcaatttttgcttttttttgcaattgcttttgtcatttttgtcatgaaatctttgcctgtgcctatgtcctgaatggtattgcccagattttcttccaggatttttagagttttggtttttatattgaattctttaatctaccttgagtttatttttgtatatggtgtaaggaaggggtccagtttcagttttctgcatatggctagcccgttgtcccagcaccatttattgaatagggaatgatttccccattgcttgtttttatcaggtttgtcaaagaacagatggttgtgggtatgcagtcttgtttctgggttctctattctttttctctggtctatgtgtttgttcttgtaccagtaacatgctgttttggttactgtattcctgtagcatgtagtttgaagttgggtagcatgatgcctctagctttgttctttttgcttagcatttcttttaactttaaatatttttcaggagttgatcagcatcactctgttttgatgcaaccccttgttaaaatattgggcagaacacagccaaaggaagaatgctgtggcatatcaatgctttggagtaggtttattcaatcaatcttctatctatataatttcactgaactatttaccaagattttccacaacacttagattgctagtagccctgtaattccaaatatattatttccatggtttttatttttcccttttttttgaatctggaaatgtctttcattattgtaaagaataattttcctgctgctaacactgaggcagactgaaacatacatagaagtttaaatcattgcttatgttattctttgaattatatacgttctcactgaacttaagtgtgtgtgtgttctcaaagatgatatttctgaagtgcctacaaatgtgaaccaaacttcactaaaccatgctatgtgacttctgtggccactattaaaaagccacagtcattaatatcagtataaatggtaaatatatatactgatatataactactataaataattgcctccaattattagtcataattgcaatattggtatctacattcacattgtttataatcaatgaaataaaattgcgttcaggatagtgaaattgtgtcataaagggctgtttggttttttggggtttttttgtttttagctgaaagcaggattatattttaactcagtaatcccatttttggaaattagcaatctctccatcctggtacaactctgctcactccagtactcacagtgagatctcggaagctaggatggttctaagatccctgaaggtagaattttaaaattccaaaatgatgaagttgctgctgtacactgctacagttgcttcctaatgtttggctccttaagtaggaaatacagttcaccgctaagccaaagcggttcctaaatagactaattcattcacaataatggaagcttaggttcattacatgaaggattagttacaaaatggcaatgctacactcatcaggtttttctcaagatctataaagaaagcaatgaacaaatgattaactgtaacttataactcttttaatgtgcatattccaagttcataataggaggcattatatgttaatcatatacagtagtttcaatgaaaatcccttaaaactattctcaagggatataatgcagtcaggtaagtttaaacctataaaaggaccactgccattgacttctacaaaatttgagtgtcaaacttactgctatcaaagatatgtaatgccacagaatacaaaagccaacgagagaataactcaatatataacccaataataatgcatgtaagcacgtgagcaatagaggaaaaggaagggaaaaataggctactcgttggaaacatatatagtatctaggttcagataggtctgtttttctcaaactataagatactgagtagtctaagaagaaaaattaccaacaacattgtttcttataaaatatatttaatatatttaaacacacatctataattgttattatgcaagaatccacattgaaataattgcaaaacaagtgattgggtgtatcatgaatgcatgaagtagaattaaatgtcaaagcttcatataaatattaattttaatgtcaatgctaagtatctattagtagtatttaccaactaattttactggtatacactgcctcttaatcatcactgctccatgttatgcaacttgtcatcatttcatccatttttgtcttttttatgtacttaataaaaataaaatgacttaatctatttaatttgtattattgttttggtcctgtaattaagttagaatatgaatgaattttttaatcatttcttgaagcaattaattgttgcagaccatttttttgtattctttaatcaaagtgcatattatatccatgaactatcgtatatgttctaccaatatataattatttaaaaagtattccatggtcaaataaatttgggaaatgtgtatttcaaaaaattttctagtaatttctataattacatggtatatttcagaatggtgatggaataattgaattatagaatttgcaagctaggtggaactcgggtatagtctcctcacttaagggtaaaagtgaagccaggagaaatgagatgactaggactcagttttctggtttctaattctgtgctcttctacctggctctttatatcctgatatcacaaacatttaaaagaaagaaagagagagaaaaggaggaaggaataaaaggagaaaaaaaaaaaaagaaagaaattgtatccaccaagaataaaaatgttgcccagtagtactgttgtggaattgaaagattagatgaaatgtgtttgctactcagccaaagtatttaacgcatcatgaaattccataaataatcagttatacagaagagacattaaggactatgaaatgtaccctagaggtaaactgtagaacctaacaaagaatggataatgggtcctcagcacagattagtgacccagcttaagcaaaagcaaattaaggctgaatttcgagaatagtttaaaaattaattaactctcacacttaggagattgtttgaatgtataaaactcactcatgtgggcttaggcctttattaaacctttattaaaaggttataggactattttatagacgccaaagctaggaaggcaactaagccccttgcgggattagaacccatctagaaagctaccaagaatgaagacaattataattatcagctcttttttcgtggagttcatagattctcatcgtgtgtctctttggatatcagtttcatactcttttttataggaaaattggcccccctatttcaagctccagtaaagagagactggaatcaatgtgccccaaatcaaaattcctcagagacaacctgttcttccatcttgggggtgggtgacagaaagcaatgtagtggcaggaccttctgccccttccacagcaattacgaaagtaggctgtcttgaatgacgtcatcaggggattctctaagagtgtaacaggatgcagagagcaagctttggcaaagacacctgtggcttctttaaaactgagtatctcttggaaagaaggaaacttccagcaacagaacaagtaagaaaacatggaaaatatactgaggcagagagtagaagggagaaatccacacttggctcttgaaggattatagacttgttccaatccttaggttgcagccacagcaagctttgctttaggactcttcggtgagcccagggtaagtacatatgggctaataacaagagcttgcttaccccctttactctctggacgtgcttcacctgatcctggtcacccttttcagaattcctgctcagcaacttactgctaagtctacttcttgccttcctgtggacctaggacattgatattatctgcaataactgccatttaaatagacataatcttggagataatctaaccaatcctgataagctgaaacaatatatgttttcacatgggagaggccttggtttgaatccttaactgatgcttagaagacatctaaccaaaataaatttacttaacctgactcttgatttctcatcaagataatgatttgctcaatgagtttttaacctaaaaatataggataatttaagtaataataataactcaaaacaacaactagatttctggtctatatctcctctcctaaaccctgatcatcatttgtacagcaagtcatgaattttgggtcctttcacttaaaacatgtacctttacattgagtacctacacatgcaaagcattagcctagaaactgcatggaaaacaaaaatttaccaatcacaggatcctgcccaaaaggaaattacaaagttataatggacaatacatagaaggaaggatggaaggaaggacggatgggagggagagagggagggagggagggaagaaggaaggaaagaaggaaggaaaggagagagaagaaagaaagatttgaaaattgtctactgcgcactatgctttgtacacacataatcatactcttcacaagcagtcttttaggtaggtattattgttctcattttatgaataaaagaacagaggctcagaaagattaagtgactctggggaaatatttttaaaatggttcagataatgtgctgcgatgtgattacagtagaaaaaacattacttttaactctgtagttcagggctttgtgaagcagatgaaatctgagccctctatactgggtgggatttaggcattggcagaaacaccagcatgagccagggttctgacagcagaaagaacatagccatgtccaggactaccaaacagttagatcatttcatagtattatacacaaaggggagaagtcttgggaataaggttggggccagatgacggagaacctgaatgcccagctaatgttttgtaaaattactgtgggtagcagagaaccactgaagatgagtgaaaaacatgatgccatcagatctttggccagaggcaatgtctgagaaaaaatttgcatggggagcatatgacaattaccaaggcaggaggtaacagggagtttgatttaggattgtggccacaaaaatggacaaatgatgaaggtgtgaaagaaaatttgcagaggtagaatcaacagatcttgatagtctttaaatatatttttaaattttaactacttttattttgaattattatagttacatgacattagattagacagtcaagagaagaaaaagtcaaagatgtcctggatttgggcaataagacaccctcacggtagctgggagtgaataaggaaccagacccttttctcttctactctatgggctttctgtttaacaggaagctaattttgttactttttatgtgaacaaataatgaagcatattgttttcataaacctttgtaaaatctgctgcattctctgacatgtttgcaaataatgccacattctccagacagtttatgtgcaacatgcttcacattactaacagagaaacatcactaaaataatattctataacaaaattttgaaggtcattccttaaaatatgatttttaaaatggaaatacattgttgagaaatgttaataatttgagacttacacattagacacacatatatttttactcactaccaatctggattttattattcatcttcaagacatttggaacagtggctgtcaactccagcggcacattagaatcacctgcagagctttaaagaacgccattgcctgagtcctaacctgagttctggtataaatgacctaggagcagcttgggaattgtgtgtgtgtgtgtgtgtgtgtgtgtgtgtgtgtgtgtgtgtgtgtatgtgtgtgtgttttggggagggggcggttaagctcgctagatgattttaatgcgaaaccatggttgagaaacacccagcaataagaaaatttattgattatgttagagataattcactagtttatcttaccatcaaaaagactatttgctacatttatataaattagacacataagatcccaaactagtcttgccctaatattaaatatgataaaagttatatcaagaaggagagcttggtgggctcagtggtcagaatagagggaataaatgaacaacaagatgtgaagcaggctgacttctgaaacactttgcttattcttttcgcttgattcagcagcaacttctggactattacagcagtgaaagctctcctttgctcctccctagtcactctgcaaacactcatttgctggctggctgaccctatcatgtacatcccaagttcctccactcatcctcccagcggcagcggtgacctccaggtgcaaaggccaagataaggcttttggtcacattggaactcatagaaactgggaggggagagctagctgtctggctctgtttctccatgtttgcaggaatgctgaatgatctgctcattcccagatctcttctctttcctgtcatacaatgagtaaggtgctgattagctagctccatggcttaaggcactgtcaacagaaatcccatattaaatgtgcctgttgcctaggcagagtgaagcatttctttctattgctcatcatcgataaagagaaaactgctacgctttctgtagcaggcaggactgtgagggaattggacaaggtagcagccatggggaatatttagagtgcacagcagtaagatgatctctagcttttctgcattgctcactgctattccattaaaaagatttttttccagcctggctctggtcttcattcattttattacttttccatggagtcctcctcaatgttccaagtagaattctatctatttctcaaagcttagttaaaatactgttttacttatctgaccataccaacttaaataatctttctctcctctctcagctttggaattagatatttttgcacttgtcattcttcttcactatacttaagcatcccaagacagaattttgcctttgtccaatgtatatacaacatggcaccaattgccatccagtgcacataacaggtattcaacaaatctgataaatgaattaactaatatagatcactctaaatctcatcaaataattcatgaacaactggaattatttcagtattgaaataactagtaagtttggacatgagagaggtgaaaggctcaagagcctcccctggaatggatatctaaagaggtatttaattatttgacataaataatggacttgtatctgaaacaaatatgaatattctcacctaactttatcttatgggattgcagttgtttttttccaactctttaatagtagcatatgttcttttctgaaacactatttaaataagcttgatttatgcaagtcccagaagtcactccttgtaattgtaccactgaaatcactataattcttggtttaaagaagttaatatattttctgccagagtgacaagagggtcatcacttatctctgagccctccatgtggcacactcaagaatgacttctccatctccaaggactgacaagctgtatgtttatttatgagaccttaatccaaactatccttgtttcctgattgctgggggagctatgaggaagagattttaattaccaaagtcctcaacagttctaagttacttaagagtcatcttaacattgctttcattgcaacccatggggttttagcctatttaaaattgctttgcttttacttcacaaaccttgtttgacccaaatcaaccttgtttcagttgataagtttcacaaaatttgaagaagtatttggaaacttttttcatttccacacatcctttgaggttttcctaccctacaaagtacctagcagagagcctttcagatatccagtactcaggatacttggagaaataacaaatgaatgagggaatggtctttacattttgccagtagaagtaattgagatctgaatttgagatatgttggtatttagtttcaaaaatggaaacatgatggaatttttggctgaaaaacttcctttgaaatctatctaaacatcttataaataagatatgcccttgcctttgttcataggtatcttgtgatacatatgtccaaatctttcaactaggttataaattactgaggagtctgggtgtggtggcgcacgcctgtaatctcagcactttgggaagctgaggcaggcgggtcacctgagctcagtagttcaagcccaccctgtgcaacacggtgaaaccccgtctccactaaaatacaaaaaattagccaggtgtggtggcgtgcgcctatagtcccagctgctcaggaggctgagacatgagaatcgcttgagcctgagaggcggaggttgcagtgagccaagctcgcgccactgcactccagcctgggcaacaaagtgagactccatctcaaaaacaaaacaaacaaacaaaaattacagaggaattatgtttattgctcagcacagaacctagcacctggtagtagatgttctataaatgtgcatggttgatctatttctacatcgtgcaatatttcaccttcagacttgtgtctccaccatcatatagtctccttccagatagaacctgctggattggaatttagtgtccaagatcagaccaagctatttacgcaaacataatatcaagaccagctcattggaaaattgcaaaacagcaaagaatgtcctcattgacccttttcctcacaattttcttcttctccatcaggtaatcattgatcccttcttgctttcataaaggatctgatctactcaatacaaaggtgtattaagaaacaaaagcaaatgtacataaatgggaatgcatcgaactaaaagcttacatctgcaccacaagaaaataaccaacagtatgaagaaacagcctatacaataacaaaaaatatttgcatccgatatgaatattcgcacctgatatgaagttaatattcaaaatacagaactcaatagcaagaaaataaataactcattttttaaaaaggtaaaggatcggaatagacatttcttaaaagacatacaaatggccaacagatatatgaaaaagtggtcaacatcactaatcataggaaaatgcaaatcaaaaccacaatatcacctcatacctgttgaatggctattatgaagaagaaaaaaagataataaatattggggaggatatggagaagagggaacccttgtaccctgttggtgggagtgtaaattaatacaagcaccattcaaatgagccaccattttagcaagtcactactgcagcaaaactaacagctgtaaagtctatcggaggactatgagcagccctataggaaaaaaaagaaagctacactggtacttccccattgatcacaggcaaagcgtgaactctctgttgaattgattttgcttagaagaaatacaagaaaggtttcccagaacacctttgaaagttggtgccttataaatggaaacaaagaaatcacttaaaagaaaacttgtttgtttcaacagacaggtcgttaggctgcttcttgctgtgtagatcacaatggtgaccaagtgctggcggtgaatgggccacgctgcattcattatttaccaacaagattaaaggaatagtgactatgacattattatttcaaactctaattttctaggattaacagggaaggtcagcattaaaaacactttattttcttacattcacttttcttttaatcatgaccagtcaagataatgtgaatgagatatctatttctgtgtaatgaattatccccaaatgtagcatcttaaagcaacaaatatctcttacctcacacagtttctaaggatcaagaattcaggagagcttagggtctctcaagagattgcagtcaagccgccagctgaggctgctgctactgcaagtctcaactggagctagagaagcacttctcgagtcactcacatggttgttgacttgtctcagttccttgctgactgttggctggaggcctccatattttaccatgtggccttcttccataggctgcttgagtgtctttgtgagttgacagctagctgcctccagagtgagtgattggagaaagagaaactgtaaccaagacagaagccacagtttttataacctaacctccaaagtggcacatcataactcctcctgaattttcttggccacagagatcaaccctgatacaatttgaaaggagatgacccaaaaatctgaataccagaaagtgcagatcactggaggccatcttggaagctggttaccacagaatatttctttagatgccaattctctatgatgtatctaaagaatctgatgttccaaggatagtttattacccccaccaagcagtagttcctaacttttttgggggtggggcaggggagtaacataggttccttttaagtctctaatgaaagctctgaatatacttcccaagagaatgtacagttgaccctctatattagtaggttcttcatccacaatttaaccaactggggattaaaaatattccacaaaagtaacaatacaaccacaaaaataataataaaaatcattgtttataacaactatttacatagaatttacatattattagttattagcagtattctagagataaagtgtatggaagaatataggttaaatattaacactataccattttatgtaaggaacttaagcatccactgggttttgtatctgcagtcttggtatttggctctggaatcaatcccctacagattccaagggatgactgtacaaatgagtcattataattttgtacataatttccaagagtccaaggagtccctaaagattttctaataacttcaggttcagaaacactgtcgttaatagttaaccttcatcttgcaatccctaagcacaaggacatagctgccattgggaacttatagtaggacatacatttagataatgaaagatagacttatttaatgaaaaaggcatagttggcatttttatttaaccagaaattcaaagagttttgaatagaacatggccattttctaagccagacttgcaaaaaattcctgtatgggaaactcaaatgcttatttatatgttgccgtctttgaaagataaagaattcctggggtgctgattttttcagggcaaagtaaagggagatggaggaattctgctatggagaactcctatgaacaaaaatgtagtgtttcaccataagtgtttgataatatatgagagatatctatgtttaagaaactgtggtcaataaaattgagcctaatttgatatttttgtaagacctcttcccattctttctttttcaggttttcattttgaaatccagacgttaaaccactgtcttagtccactttctgttgctataacagaatactataggttgagtaacttacaaagaaaagaagtttatttagcttatggttctggaggctgtgaaggccaagagcatggtatcagcacctgacaaaggcacggcagaaagcatcatacggtgagagcacatgaaatagagagagcttgcttttatgccaaagccactcttgcaatagctaacccactctcatgataacagcattaatctattcatgatggaagaactcttatgacctaattacctcttaaaagttccactctatcagcactgctacattggggattaagtttctaatacaggaattttgggagatacactcaaaccatagcaaacatagacactctgctccagcctactagctacttttactgagttattatctttcttttccactaaaggtaatttttaaccaagttccccaaacatgaccttcctcttccaactggccatttagaatttcagtagatcctatgttctggtatcatttaatgaaagactttggacacagagtgaaagtttatgatactctaggactatgttcccttcctatgcattctcatagcatcctatatgtgtgtacatatatgtatatataattatatatactagtactatatatatacagatatatagtatatgtagatatagtactacatatatgtgtatatatgtagatataattatataacaagtacatattatatatactagtatataatttatatataatcctatatatacatatgttatatatagtatatatactagtatatataatatatacatatatgtaatacatatgtgtatataattatatatattagtgtatatatacatacatatagtatatataattctatatactagtatatatgactagtatatagaattatatatactagtactaggatagtactatacaaattagacaatttgtacaaaatggactatataatattctaaattagtaattattattccatagttctatatggaaggaaatacaaccatgaatcttacagggctgaagtaaaatagtaagagatcatggactgagttgggaagactggctttgatagttcttagctgggcaaactaggctcagtctctggtctgttacctcatcagttaccccatacaaaatggcataatacattatatgaccactttatagaattttggggggtccaatgggacaattaatgtggaaaatatcttgtaaaccatgaaatactagactttttatgtattatcattattattaaatgcactgtttagttgacagagctgctatgcaacaagataaataggtaatttttgtgtttaaaaagtgtctctcagagagaaatctatgctcactggtctgatggtgtcagaaaaaaaaaatactttcgcatggtaaatagccatttctgttctgaaggctaaattctgtgtcctctgtcattataaaaccagttattgatcttgacaagtacagaaagtactttgcagaaaatagatatgacaaggtccctaagtactaggtttgcatctaaacagagatagaagacttggcctcaataataaagctcacccacttccctgaaagtatggcctaaccccgaaggtttggaaatctgtgaatacagaataaaaggtaactaggcaaactcatgagtttgtctctacacatgtcagtaaaaacgtgggtatactcatgcatcacagccccttatcataaatggaaatttggaaatggctcatatagacactttgtgggatgtagtagcattgacaaaaatagaacctatgtttctagccttaaaacaataaaaagtaactaatcttttacacaagagtcaactttcagcaagccacaagctgaattatgggataacacactgattatttgataagtgtgctgtttttattccctctaatcaagtacaaagatcttgttcaaattcccatctcaatgtgataagtgtactcagcaaataattaaacatagagtaaacaaaaaacttcataaatctcttttagaagcaactttacattttgttcccaaaatgatctgcctgcctcagtcttccaaagtgctgggattacaggtgtgagccaccacacttggctaccatttgaattttcataaggattgtattgaatctttgggtagtatggacattttaacagtattaagtcttcccatccataaacacaaaacgtctttcaatttatttgcatcttctttaatttctttcattaacgttgtatagttttcagtctttcaccttcttggttatgtttattcctaaatattatattttttgatgttattgtagataaatttttttcttaatttccttttcagatagttcattgttagtgtacagatacaaaagtgagtttaacatgttgatttcatattctgcaagtttactgaatttgcttgtttcaacagatttttgtagaaagagggttttctacatataagatcatgtaatctgccaagagaaatagttttacttctttctttctgatttggatgcctttgcttctttttcttgcctaattcctttgattaggacttccattactgtgttgaacaaaaatggcaaaaatggatgtccttgccttgattaagaccttatagaaaaagctttcagcttttcatcactgagtattcagttagctgtagacttgtcaaaaatatggcctctattatatgtaggtaaattctttctatacctaatgtattttagagtttttgtcatgaaaaggtgttgaattttttcaaaaacttttattaagatgcatctattaagatgatcatgttatttttaatcctaccattaatgtgatgtagtacattaattgatttgagcatgctgaaccatctttgcattccagggataaatctcacttgatcatagtatatcatccttttagtatttttagtacgctgttgaattcagttttctagtgttttgttgaggagttttgcatctatatttatcagaaatatttatcagtaattttctttctttgagtgtctttttctggctttagaatcaaggtaacattggccttaaaatgaatttggaagtgttccctcttcttcattttttgggaagagtttaagaaggattggtgttaattcttctttaaatgtttggtagaatttaccaatgagggggccaggtgtggtggctcatgcctgtaatcccagtactttgggaggctgaagcgggcagatcacgaggtcaggagatcgagaccatcctgcctaacatggtgaaaccccatctctactaaaaatacaaaaaattagcctggcgtggtggcaggcgcctgtagtcccagctactctggagactgaggcaggagaatagtgtgaacccaggaggcagagcttgcagtgagccgagattgcaccactgcactccagcctgggtgacagagcaagactctgtctcaaaaaaaaaaaaaaaaagaaaaaatttttaccaatgaggccacctgattctgggttttctttgttgggaggttttttattactgatttcaatctcatttgttattggtctattaaggttttctatttcttcctgattcaatctttggaggttgtgtgtttctaggaatttatttcttctgggttatccaatttgttggtgtataattatttatagtagtcccttatgatccatttgatttctgtagcatcaattgtaccatctctttcatttgtgattttatttatttgagttttctctcttttttcttagtcttgacaataatttcttggatatgacatcaaaagcacaaacaacaaaagtgaaactagacaagtgggactacatcaaactaaaatgcaaccaggaagcgaaggaaacaacacagtgaaaaggcaacccatggaataggagaaagtatttgcaaaccatacatctgataagagtttggtatccaaaatatatttggaacccaaacaactcagtatcaagaaaacacataaccctattaaaatattgacaaaggatttgaatagacatttctcaaaagaagacatgcaaatggctaacatgtagataaaaaatgttcaacatcactaatcatcagggaaatgcaaatcaaaaccacaatatcacctcacatctattagaatagctgttatcaaaaagacaaaagaaaagaagtgttagtaaggatgtaaaggaaagagaacacttgtacactgttggtggaaatgtaaattaggacagtcattatggaaaactgtatgaagcttcctcaaaaaattaaaaatagaactaccatatgatctggaatttctacttcggggcatatatccaaaggaaataaaatctgtatgttgaagagatatttgcattccatgttctttgaagcattattcgcaatagccaagatatagtatcaaactacatgttcattgataggtgaatggataaagaaaatgtagtggttgtgtgtatactattcagcctttaaaaagaagttaatcctgccatatgcaacaacacgtttgaacctagaggacattatgctaagtgaaataagctagttacagggaaaaaaacatggcatgattccacttgataagaaattaaaatagttaaactcagagaaacagagtaaaacagtggttgccagggtctgaggagggggaaatgagggattgctgttagataagtatgaagtttcagttatgtaagacgaataagtcctagagattgtcaatacaatattgtgcctgtactttacaatactgtattgtctacttaaattattttaagattgtagatctcaatttaaatgttcttaccataataaaaaaacaagcaaaagcattacagcaggtcaaaaataacactaagatttgtttcaataataaattctggtaaaatgtatttggcattttaataagtgaaacagtgctttttttcaaaaagacttactgcttcccatggcatcatgagatcatatcaggagatattctggggttgcatttatatgtatcacatggtaagctcaataccaggatttggtaagttaattgaaaagaatgaaaaaattctattaacttctttttttttttgagacagagtctcagtctcttgcccaggctggagtgcagtggcaccatcttggctcactgagaactctgtctcccaggttcaagcaattctcctgcctcagcctcctgagtagctgggattacaggtgtctgccaccacacctggctaattttgtatttttagtagagacggggttgcaccatcttggccaggctggtctggaactcctgaccttatgatccatccgcctcagccccccaaagtgctgggattacaggcataagccactgcacccggccctattaacttcttattgaagaataatatgtatacaaaaattgcacgtaagtgtaaacatcaatacatttttataaagagtacaccacataagcagcaccctgatcaaaaagcagcatattatcagcacccagaagtcccctatgtgccctcttctaggcagtagctctcctactccataagggtaacaactatcctgatttctaaaaccaaaacaatacttttgcctgtttttgcactttgtttaaatggaatcatatagtatgcattcttttgtgcctggcaaccttatgttgagagattaattaatcttttaaaatgtagttgcaactacatgctatccattcattctcacagctgattagtattagagttgtattcttaggttcttgtgaatatattacaatttattagttggttctttctttgatgggcattgggtactttccagcttttgtctgttaatactggtgttaccatgaaacactcttgtatagtcttttatgaaaagttgcatgcaattctgtttgagatacatctaggactagaattactgggtcataggttatgcatttgttcagctttagtagatactgccaaagagtttttcaagccaattaccaatacacactatcacaggaagtgattgagggttctggttgctccacattcttgccaacactaggcattgtctatctttttttattgtagcaatttttgtggtgtgtacttgtattgaattatgggtttggttttcctcaatgattagattgagcccctttttatatgcttattgactatttggatttcttctttggtgaagggcttcttgtttaagtcttttgctcattttcctaatgggatgtgtgtctcattcttattgatttgtactagttctttatatattctgcattcaagtctggagtttttgtattcttcaatcattcatatgagatgatatggctccattacatgaatgtattaacaacaaaatttaagtatttgaaattcacttgacagatatttatcaagcatctactatatatgctagacactgtgtgctaggctttgtggaaatgacttataaaccttgacttaataaataaataaattatacgatgctagtttataactgcagaggttcaggtagaataaattttcatgtttcctctatctcaacacccaagctcatataatttcagaggccttcgacttctaaaggtctaaaaaacagtccaagaattaaggtgtgttcttgaacctattacaatagttcacatagcttttcattaaatgaatcaaattaatggaaagccttgttattagaggctgtgctttggcttgctgccctagtattctggatgtttcacagtctcttaacaaggacatacataatgaaagaatgaggaacttgtgtgctcaagctgctcaatttaggtaccagggttgcagggccaaagccagaagtggaaatgtgtctaacaatccaagaatcaagggtacagtcctcagagttactagggtaagaggccaggaagaactttctgtctggaacctgggctagccacaggataaaaccacagtaattgttgctactaccactttctgggggccctgctgccttctaagcccaggtagctcgggcctcgctactgtttgtttatcgtgtttgaatatcctttattagtctgtgcccaagctcactcagtgcccatttttcactagtcctaaaggaggagaatgtatatctggttattaaatccaagtaactcatgtctttttttgactggaatccaagattgaaaacacatttgagagcttcccctagagtgagctttcctccagaagtcccagttacttgcttatattaaactttactcataaattcttcagttacatgtatattcctagataataaaaacaatactagactatattcatttcttcatataaagccatagtctattgtataaaacataatcacttctggattatcactagtataatacaaaatcagttaaaatatttaaaactttttttcattataaaagtttcattctggaacacttgaaaaataaaagtatagagaagtataaaacaaaatcacccataatcttacctgccctagtttctgttaatattttggcacaatttctaccattttttctatgtatgcttttaagatgtcatttattccaatgtttatgctgtttttcaaattaaatttatttcattagcatttttttcatattaaaaaagctcttagtaaacctaactcatgatgcttatataatataccatgaaagagagttgtcataattcatttaactgtgcccctacctttggaacttagaattttttgaacttctttcactacaataaatactgttgaagcaaagacttttgtgcagcaaaagatattttttaattatggattgctttcctgaatatattaatagaattaaaatatagtatagaaacatttttaaagacaccatattcacaaagtactttccagcaaagtgtttttcaattttgtaagaatgtttgttttgcttcaccttcatgagcattgggtatatatctttttgaatatgtttaaatcattgttggtagatgaaaatactaattgcttttacctatttttacttctgttggtttttagcaaagcagaatattttaaattacctattggccacatgaattttcttattttacttatacattcattcattcaaatatttattgaacatctactaagtaccatgcagtgttctaggtacaagaaaattatcagtgaacagagcagagaaattccctgtacctatgaagctagagagggaagacagtctacaaacaaactactgtgaaatgtgtcaggtggtaagttctacaaagagaaaataaagcaggtgaagatttagagaatgaggagggtgctatttcagacaggcattaaggaagacctctccctaatgaaatatcacttaaggagaaatatttgtaaatattctgttcatttcctcaaccaattcatttaaaggaatctgttctcttaaattgtgatccaaaaaagatagccaacattaacagtatttggatctaacgaaaactaacttcttaaacttcctagatttcatggtctttcttctcagatagtgcaatgatttcaactaatggtggtacgaacctacatcactgctcccaactcagttagcttttcccaataaataataatgtgatattatttaaatacaaacagaaaatgaaccattcttttcttttcttttttcttttttcttttcctttccctttctttcccttccttccttccttccttccttccttccttccctctctttctcaccctcttcgtctctttctttctttcctctagcattgagggtatgcttgtgatagaatatcctatatcctatttcccatggaaaaaaatggtgctaattgatagtactaaattcataaggttattgtgaggattgcatgagttaattgcatgcttagcttggtacctaatacatattaagtacagtcatgtgtcacttaataattaaaatatgttctaagatatccatcataagtgattacgttgttgtgtcaacatcacagagtatacctacacaaacctagatggtatagcctaacacacacacacctagactatattgtatagcctgtttctcctaggctataaacctgtatgccatgttactgtactgaatactgcaggcaagcataacacaatggtaagtatttgtgtatctaaacatataaaaaataggaaagatacagtaaaaatgtggtaaaagataaaaatatacctgtagaaaacacctaccgtgaatggaggctacaagattggaagttgctctgggtgagtcaatgagtgagtggtgagtatgcctgggacattgctgtctactaatgtagactttataaacactgtactcttaagctatgctaaatttatttattttttatttatttttttgagacaaagtctcgccctgtcgcccaggctggagtgcagtggcgcaatctcggctcactgcaagctccgcctcctgggttcacgccattctcctgcctcagccttcagagcagctgggaccacaggcccccgccaccactcctggctaatttttttaaatatatatttttagtagagacggggtttcaccgtgctagccagaatggtctggatctcctgacctcgtgatccgcccgcctcggcctcccaaagtgctgggattacaggcgtgagccaccgcgccaggccaagctgtgctaaatttattttttacattttctttcttcaataataaccttagtttattgtaacatgtttattttataaacgttttaatttctttaagctttttgactttttgtaataatgctcagcttaaaacaccaacatattttacaactgtagaagaatattttctttctttatatccttattctgtaagttttttctagctttttaaaattaactttttaaacttttttgttaaaaactaagacagaaacccatacattagcctaggcctacacaggataaggatcatcaacatcactgtcttctacctccacatcttgtcccactggaaggtctttaggggcaataacacacatggagctgtcatcttctatgatagcaatgccttcttctggaacacctcctcaagaaactcattcctgaagttgttttatggttaacttttttttttgtaagtaggagtacacactaaaacaatgattaaaaagtatagtatagtaaatacataaatcagggacgtaatctattatattaagtacttaacagtaacacttattatcagtaattcttgtcatcaagtattatgtactgtacataactgtatgtactatccttttatatcaccggccatgcagtgagtttgtttgcacctgcatcaccataaacatatgagtaatatgttatgctacaactttatgatggctgtgatatcagtagagctgacaataggaatttttcagctctattataatcttatgaaactaccatggtaggccatccatcactgaccaaaatgttacatggtgaatgactgtactaaataaatatttcaatattttaattattaacataatcatcaccatataatattcagctgagcaaagctgcccaaatttgattctcaccttcctcttgcattgacttcttagaaatcaaggaatgagatgtcaggagaatttgttcatgatgttggctgccatttaaaattatagctgcatataaatcctgtctacttccaaatttctttgtgtgaatgagcgtcatttgaaaagttaaaagatttacagttgatccttaaacaacatgggcttgaactgcacaggccaacttacatgcagattttcttctgcctctgccacccctgagacagcaagatcaacctgacctcttctttctcctcctcagcctactcaacatgaagatgaagaggatgaaggcctttatgatgatccatttccacttaatgaatggtaaatatctattttcactttcttatgattttcttaataacattttcttttctctagcttactttattgtaagaatacggtatataatacaaaaacataaaaattatgtgttaattgactttggtgaacagtaggctattagtagttaacttttgggagaagtcaaacattacacacagattttcagctgcacaggggttggtaccactaactcccgtgattttcatgggtcaattctatattgaatttagtcttttccctattttgtagtcctctgaaaagccatgcaaacttgctgggaatccagaattaatcaaatatagagctctgtggattgcaggaacttttaactatctcacacaaaaacactaacaaaattttttttaaaagagaaaaaaaaataactggaccagagtgtgaaaaacacatatcatttattattcaagtatttattcagttgctttctttattagtccttcctttctaatctatcaaatctcattggtttgtctcacagaaaatccctttgatatgaaatgtaaatttccaaatctgctgtttcctcagtactttgactatcatggttctatggactcttacttttaagaatatacaacagaagtaaccagaaatacttcttctctcaccttttccctagtattcctgtcttcctctccacatctcttactttttgtcctaaatgtggaaattgacaaatgaaaatttaaagtcactaccttataaaagactgatttgaagtttttccatgtcatttttttaattctaggaaaacatcttaaatttataagtcaataaaaacacttcaaaacagagaccaggtaacattagccatcaaaattcatcatgatgtgctgggcacaaaagattttcttaatgaattatcgattaagatgtcagataaattaattgacatagaattttctaaaagaaagtagaaggagaaggaaatagttaagtaccccagatgctaaaggaaatcaatagacactgagagaagggccgcaataactctcatggctcctttccactttctagtgttccataaacctggtattttgttgtctctacctcatactatttaattgttcttctgaaaaagtagactgcataagttgacttcagatccattttggcttttgagttccaaatgggaatttacattaataatacaatctgcaatattacattacattaactttatcacccatgtcccccttcttcctcaccatccagaattaataaagaaactaataatctggccactgagagtttagactatataaaaggaagtctattttaccacttactttcagatgttgttgagtatgaaacaacatactcaagcaaaacaacatttcacttgaaaacggtcttcctactcttcaactgccccacctaatggcaagaggtatgaataacagtgatattctggatcccctagttgaagaaacccaacagtaatttttcagatctgtgcaaacttgtagccctatgattgaaacatgcatattttcccctcaccttcacagtactgcactacactcatttacagtgcctgaattcatgccacttgcaagctttttaatatgtttctaataataacattttgtcgttacagatgaattgtggtaaagtttactgagataacaaaggcttcgcacattctcattctatttagcattagagaggatcacagaaatcattcacttaccactatccctattttacaaaggagaaaactgagatgcaatgaggtaaaattatttttctagaaatcacatacatctttagtggcagaaccctggtcttcaagaaagatgcttattcatcagactgctgcgtccaccaccaaaagcatcaacctaccaccattttctgataactaaattcttccaatctttactcttaacaagaggaaagtgatattatgccctttaataagctcgagggaaaacagtgggggtgggggcctctttaaaagttagaacttgaattagaaaacacaaattagaatatatacccaacaaaattaagtacattattgtaaaagagacgttagcaaaatagatttatccagcatgccccatatatggaagattagcatagtgggtaaaattgttaatgctttccagagcccagggtttggtatccataactgaaattaaccatgtttcttggcaatgttgtccctattcttccatgtcaactaagagttggcctctttaagtctccgcagctgagacaaattacattgtatctctaaggacctatttaaaaccttttgttgggttttgtttgctttgagccatttgctttgttgttacatcatttgagttgtttggaggttttgtgtatttcttttattcttggtagtaatatttgatctacaaaatccaaacttacctcccaattctaaaaggcagcattagtcagtgtggccttcagaccatctacatcagaatgacctggggagcttgtttaactgtggcaattcctggagcccttcccagagatactgaatcaaaaatctcttgggataaacttcaagaacatgtattttaagcaatcattcctgattatgttaatgcatattaaattatgagactcgctgccaggaagaaaaaaaaaagatgctacccaaccacaaatggcaaaggaagaaattaattttcccttatcccagaaagcccaacacttggcaccccttctacctggtaccacagacttagtttgtagaactccttaaattaatgagaggtttcattagcagaatttaaaatggttcattcctagtccctgtcctgagaacaaattacacagaaccacaaacagatggttttcagttatctgttttttaaacaatctaagttaattgaaaagcacaatgtgatattatcaaataacagctgtaccaaaaccctaccaaactaaaactcaaggtcattttgagggaaagaaaaagaggtatatgggcttatgcatctctttttaattgaaagcctgggctaactcctgagctagctatgttgtttcataaactgcgttggtcagtcactacaacacataagcgtgtttcctctttccctttcccattgttattctctctccactttttccatttctatccctattttcttgcctatttattactctatattttcatctcttgagaaagttattgagtccatttctacatatttttttcactgggtaggtttagctacacaccatttagctaaacacaagtttagctcacttcctctgagcaacttggtttccagagcagctgtttccagcagtctttcctctttataataggaaatgtggttttacatttacccaaatgcagaggcacatgtgtgtctgatcctacagacagcaaaggtagtctgacaaataactggctgattccaaattatacaatatatgttctcttccgatgattatcatacttgtgctcatcacttcagggatgcacaaggctcagttgtagcactgctctggaaactagttaaccatattgagacttctttatggggtgtgcccttaactagcactgccaagtctgtaaacttatttcctccaacctttcattcaaggaggcactatttctcaccattcccaacctcccctaccacgccaagccttgagttaaacaagaaaggggcaagatttggaaagaaaatattggctttgaatacaaatgaaaagaagaagcctggcccactagccccaggacatccccattgactttctggaaatctgtacacaccacaaatgagatgatgatattggagaggagagcattctagcagaaaccatctggtaaatgctgatctatctgtctaggaatgaatgtatcatttaaatatgttaacctcaaaatgccacagagctgtctttaataccacttagcctcttaatagctatttattcttcattttgttctattaaccctctcttttataacactttgtttttaaggaaaataatttaataaaaataaattcttctcaaactctcaatatgatgacaaatcaagcaatagattgggatattaatgataaaattattactaaattatcaataataattctaaatatcaggtaaagaggaaaaccaaggacacagagtaaagaaatcctttatttacaactaacgggaaaactattcaaaggcactggtcaacaaataaacctggattaaaaatagaaattttccagaagtctaagtggaatactccttatgttgcaaaaacccaaaacctagtgaaatctgaaagttaattattttccttttctccttccattctatttaagcaatcaaaaactcatacttctagaaaaaaagatggattttttcaataaatggtgcagaaacaagaggataccagtttagaaaaatatatgcggctgaatatctgtgtcactacttataagcaaatatgttgattactgagtaaacatactaaatgttaaaaaatgaaaacttgctcacagaatgatatagccaacatggaactggcagtcaaggaaaatgtgatggaaattttggctctattaattattctgggattcctaaatcattgcaggaggacatgagctggttttgttttgtttcttaattgacattctgtcaattaagtatgcatttatcaaatacaaaatgatgttttgaagtattctacattgtggaatagttaaatctagctaattaacatatgcatcaacttacatagttatcgctttgtgggagagcatttaatacccgctttcctagcatttctcaataatacaatatattgccattaactgtagtcaccatgctcagaaataaatctcttgaatttattcctcctatctaaaattttgtatcctttgaccatttgtccaagccccctcccccaacctgtctagcctctctaccatttacttctttatttctatgagatcaatgattttagattctatatgagtgtggtcatacagtgtttctctttttgtgcctggcttatttaacctaacatgaggttctccaggttcatccatgttgttgcatggatgattgaggtgattccatatcttggctatcataaaaatagtgctgcaataaacatggactgccctttcaccattgtgtgttcttggcacttttgacaaaactcagttggctacaaatgtgtgaatttatttccaggctctgtattctgttccattggtctatctgtttgtttgtttttatgctgatatcacgctgcttaggctaatttagctttgtagagtattttgaagtcaggtagtgtgatgcctccagctttgtgctttctgctcaataatactttggctattcaggttttttataattctaatattaattttaaaatttctttacttctatgcaggatgtcattaatattttggtagggattgcactgaaactgtagatcatttggggtattatggaaattttaacagtattgattatttgaatccatgaacatgaaatatctttctatttatttgtgtgttcaattttatatctgtataacattattatatataaatatgtttttatattatagataattatatataatataataacatttaacctttgatctatgtgtgtacttacaggtgaagtgggtcccttgagggcagaatatgattgggtcttttttttaaatctatttttctgtcttttgattgcagaatttaatccatttacattcagggcttatttatgggtaagaacttactactgctattttgttcactgttttctagttgttttgtagagtctttgtttatttctctcttactgcccttctttgtggttaagtgattttctctagtagtgtattctgattccttgcattttgtgttgtgtgtaccaataatagggtcttcctttgtagttaccatgaggcttataaaaaacactttataaaatttatttatttatttatttgagactgagtcttgctctgtcgcccaggctggagtgcagtggcacgatctcagctccctgcaagctccaccttctgggttcacgccattctcctgcctcagccttctgagtagctgggactacaggcgcccgccaccacgcctgtctaattttttgtattcttagtagagacgaggtttccataattttaacaagttatttttccattgtagttatcatgaggcttataaaagacacttttacttttaacaggttattttaagctgataacaacttaacatggattgcaaaataaaaattaaaaaactctaaacttttacctcattctcccaaacacattttgaattttggtgtcacaatttacatcttattatactgcatgtcctgtaacaaattattgtagttattatttttactaatttagtcttttaacctttcttctaaagatataagtgatttaaacaccaccattacaatattagagtattctaaatttgactatgtacttttaccaatgagttttatatttatagatgttttgtgttactagcattaacacatgtttttgtattattagcattcttttattccagcttgaagaactccattaagcattttttttaacacaggtctggcaatgataaacttcttcagcttttgattttctgggaaagtatttatttctaaaagatggcttttctgtgtatagcattcttggctggcattttttttttccttcagcacttttaatatatcaccaagtccctcctgatctgtaaggtttctgctgagaagtttgctgatagacatattaaaatgcccttatgtgttgtatgcttattttctcttgttgctttcaggaccctctctttgtctttgatttttgagaattttatcgtaatatgtattgaatagtcttattttaactgaatctgattggaaatctttgaccttcctgacctgaatacttatttctttctccagatttggaaagttttctgattttatttcttcaaacaaactttctactcctttgtttttttcttcttcttgacaccaatgactcaaacatttgttttttgatgctgtcacataaatctcatatgctttcttccttcctttcattctttcctctccttgaactgtgtattttctttttttttttttttttttttgagacggagtctcgctgtcgcccaggctggagtgcagtggagcaatctcggctcactgcaggctccgccccctggggttcacgccattctcctgcctcagcctcccgagtagctgggactacaggcgcccgccacctcgcccggctaattttttgtatttttagtagagacggggtttcaccgtgttagccaggatggtctcgatctcctgacctcgtgatccgcccgcctcggcctgaactgtgtattttcaaataaccctgtgtttaagtttacagattctttttctgcttgatcaagtctgctgttgatgctatttcattttcattttgttcattgtatattttagctctaggatttctgtttaattttaaaaattgttatttcaatttttctgtttctcattgtgggtcacttaatgttctccttttttaaaagaaattgtttatctgtcttttctcaacattcactgagctttctcaaacagttattttgaattctctgtcaggaagttcatgcatctccatctctttaaggtcaatcactggtgctttattctgtccatttggtgtcatcatgtttccctgattatatctgatgtttgaggacatgtatcaatatctgcacatctaaagaagtaaatacttattccagtctttacagaatggatttgtctaggaatggtcttcaacaataaatctatccagagattctgggcagacctactggcatgatccccctgtccaagactactgtggccattgcagcattaaggggtactcttagcctgggattgctacctgtgcaatcaggtacaaagccctgagatatagatattttctactttaggttgcaaaccactctggctataacaagatttattaatattgataagtaaagtgtggacatagtgaaagaacagctaaaacccaaaagagctaatcaagacttatcaaagttaaaagtaacatcttttgaagaagaatgttttcctggataggggttcagagcagattttccacttggcatagtaatttcaggaggaagacttttaatgcctcagtttttccaattccataatccctgttttctaattcctcactggaaataagttattggctattttctaactaaccattccactgtaggctcccctctccctcacaagacattatgaatctctccatgctgccccttcttctgtgaaccctcttctgagtaggtaggccgcatagccacatatatgtatatagttgtcccttggtatccgtgggagattggtttcacaacttccagtgaataccacggatgctcatgtccctgatacaaaatggcatagtatttgcatgtaacctacgcacatcctcttgtgtactttaaaccacctcaagattacttacattatctaatacaatgtaaatactatgtaaatagttacactgtatttttttaggaaataatgacaaggaaagtctctacatgcttactacagatgattaaaaaagtattttagatttgcaattgactgaaaccacagatgcagaaatcatgaatatgagggctgattgtgtatgtctaggtatgtgttagtacatatttattcatatggctgtacctcatgcaacataatgattgaaaataagaaaaaagaacaaaagaatgcagttgtttctcagtataccactagagctcttgttgttgtacttgttattactacttttttcattttgtttattgtattttttaactctaggattttgccttcttttcctcttctataagataacctaccagaatacggataagacagcttgccatggagaattattaatctccaagaactatttcaaatagctatccctgaagcatctaggacatttgaaaggaagtttgtttgtcaaggttaggggaaaagagaaaaaccataagaatgttcaaaaacatgggcaaaattatccataatcttgcagtagaaaagcctcactaagcaaaacacaaaaataaggaaacattaaagaaaaagatcaactacattttttacaacacaaaagatgtacctccactgtttattattgtttaaactttcatatatttatatactgtttaggagttttcaaaatatcttaaatgaatttgctcagatttttttcaactgaaatatttaattcatcctaatctaacctcttccctcacaaagagcacaacaatttttttgctggagttggtttctaaatctatctatgagatagaattcattcctactgtagaatggacaaagagaaaagctgaataaaggcaagagatgaagaaataacgcactatttctaaccccatttttaattcatttattaatccacaatcaattaataataatataaagttttcattaagtccccattagttaagacgtattcatgttgagtgagatataagcatgcaagcattccaagtctaaataaactattttggaatcccacttttccctctgttccctttattactgcagagacagagtcttaaaaaattgagagaatgcaataacaataattttttaaatccattaatttccattcttcttgattttagcataattttatatcattttactttttgtggacctgcaaattatatttagtttgcattatcgacatgaaaagcctaagaaactcaatttcacaacagttcccagaaaatggctcagtttttactctgtactctgcatttttctttcttttttgatgccatttttacctcataaattatactgaccatgacctttttagagtctaatttggattaagtattataattattttaatttcagaagaaagaaaatttacatagcattaaggaatagccaacctagaatattatgccaccatatggcatatggatggataaaatggtactgtgttagacactttaacgtgctttgtctcacttagttttcataacaatcctatgatgtagtcattatcacctatattacttgggatgagtcaaataaggctcagcttggtaaagtaatggctagcaactgataggctagcctttcactatagatctacataattccaaggatacagagtaaaagggaacaaactaaaaaagaaggaaaagagtgaacagatctcaggtaaggatttgaaaatcttccatttaaatgcctctccattacctgataaaagtgttttcttgtctacagataataataataataacacagcctaatgtacaaggttgttatgagttgcaaataaggtaatgttttttaagaggactttgtaaactgaaaagcatcatacaaatgttttatatagtattatcataatgaggcctctgtacacaaaataaagagcacttgattagagcattaaagtgatccagaaaaatcatgaagagaaacacgataatgacatagatgatatgtaatgacataatagatgaaacaacagaagagaacatcttattaaattacaataaactcttcagacaattctgagaatacatatatctctgactctttaatttctagtattgataatggaaatgatgaaacttccaatagtttacttttaaagaggagaaaaagctgggaaagcttaagtgaaaatggtaaaccataaaatctgtcagatgaaaagcataataatctaaccattgaaatattttcaagtttgggatcaaaatatgtatctggcagcacagggttatgattgttgaaataaagaaactatcttctagatacttcaaaatcaccttactttcagaagttaaaatatagtggaatttttatcaaataatactccatgtaccaaagatggaatgactacattgtcatttgttgatgtgcacatcagccagatagctagttaagcaaaaatagtatacacaaatcgaactttgtggctcctttgtaaatgcaaggcaataaaccatatgagagaatttcaattgtttttggagacagagagaaataaaacatatttctaggtagatacagttgattcctaaaattatactgttctgaatatgtacggggagagatactctttacagaaagggaccattgatgaaggctgttgtgcgttttcagaattcatcttagttctactgaagtgcaaagtagagacaaattgaaaattggtcatagaaacaatgaaagctcaatttaaacaaagtataaaacttagagaaatgcatggatctgaggtagaaggaagggttaacacatccaaggagagacagaataaaagctcttactattctgaaactcacataggctttataaatattttttccagaaaggattaaaacctatcccactgtggatttaaatccagtgaaatctgaatgaccatcctctaatcagaaatgaagtatttgggaagacatgttcaaaaggtcataaggcctgtatggccacttatcttggagaaattgctatttgcataggtgtcttcttacaagctatttaaagttataaaaaagaaactgaataatgtattccatactcatatccagacaagaggtctaaagttcactcttgagccaaatatttccatatactaactttaaggttttaaaatgattcgacttttcaattttattattaaaacctacataaaattttgagactttttcctcatattctcttatttcaaatatgtatgttttaggtattttagacgtaagtattggctcctttgtgtactttagtttgtttatccaaaaaataggaataataatcgtatcatagaaaagttacataaaatattagtgtcatagaatagttttgagaactaaatgagtgaatatatatatattatattatatatataatataatatatatatatacacacacatgttggcatttggtgaggtcctcaataaattttgatcacagaatattgcatcaaccaaattactttataagttaatttgaaatagcataaccttatgccaagtacttcaatacacacacacacacacacacacacacacacacacaaatatgcaaaatatttgaacgtattcagacttctgtgggcaatacaataaacaaaaccatctccccacataacaatgggacatttagagcccttcccagtatttctgggaaatacctccaaagggacaggtgcttcaccaaccctaattatttgtcacagcttcctctgcacagttgttccaattccacagcaatcattgctttcactctgcccctgctacctttcttccctgttttgtctctaggaggaacacagcccttctcttcccagcttgaggcaaaattgttacaatgctgttgtgattacagaaagtttaaagaaagggttgaggggagaaaagaaacagacaaatctttaaaactggttactagaactcattcattctaaagaggctttaaccaggccatctttgctacagggacaattggtagtccctcttcctaagccctgtctgctgccatgtggctctatccctgcagaactttcttatatctattcacttaccagagtcctccaaagtactgccgctccccaaacttcatctcttgagcagtcaggggacaagtttaaaaatcctaatactttattatgcaaaagagtttaccttccttgtgatttaacaaaggctaatagggatccccaacaagcctccattcataattaaaatgtcttcctaaacaaaaaatccactttctgtcatagagtgcaaaagtatctagagtttacaatataacattgttatccaactgtgaggatagctataaatatagataattgactataaatatgttacagtttctctccagtaggcacatggtgtaacaggtacattagtacataagtgatgcctacagttacatttgtgtggctccaaggtttagtgtccaaagtaaggaatttggaatcagaagaactgaagtatatctaggattcaccattactagttgtgcatcttggctaactcacctaatctgtctaaggctcataaaatgaggataaatataactgcctttcctacctgtaagtttttataaaggaaaaaaacaagaaaatgttgtaatagtatatggaaacttaaaagcattttgcaattctaaattattattgttattcttattagtcacattaacacatatattagactttaattccattcgaatctggtataataaataatctaacatttcatctaatcagtctttgctataattattcctcacaaataatgaattatgaatgatggctgtaacagaaattacacacacacacacacacaatcagatccaccttaatatgaatttagtatttaaaggctatcttaaactgtaatcaaaagaagttgtgaaaagacatagattcaaaacacttagtacactattaataggaaaaaatagagttgccacagaaacagctaatggagcaacagtcagcagcttccatatataattttactacttatcactactgtggtatattttaatgagaaccatcttggggagaaaaaataaggtgatccccagggcattggtggaaagggaagtcaagctgagatgaggactcagaaatatgtgcccacaaatacatgcagtaacacttgttgcttgtttagatgttgggagggatgatgagtctggagctgaggaaggttcccagggctctgccttaggcaactggatagctgaggcagtaaatataatagaaaatatttaggatatgtagcagtatgtttaaagatgaggaagaataatggatgcatctagtttgggaaatgttgtgtagatgttatgaatgtccagcaagcacttggttagagttctgtgactaaaagtagaaatgggaactaaatatggaaattgagagataatcaaatagaagatagttaagacatgaaaggagatatcttatgatctttcaggtgtcttcataccttaaaatattacatgggccaatgactgaatcttggggaacagcattgtttaaggaacatgcagtctcagaaggaaatagcaataactactagaaagaaaaatataaatactagaattgtcaaaagagatatacatggacgggagtgacagaaaggactggatggtctagttcataaactaaggtaaaaaggagaaatagaagagagattagctaaattgcaattgagcctatagagggaggaggcaattgactaaccctctgaggcaatagaggtgttggtcttgaatagaagaaacagctttaccctctcagatttgaaaaaggaaagacaaaataaaatgaggatataggtgcatattactttggggacatcagacagaataggaacctaaaaagttcagtcagaaaaatttaaattcctgttttaactgtattattattgggcatagaattctgggttactgggttttgtttttctttcaatactttaaagatgtcattcctttttcttcttgctcacaacatttctgaggagaaatttgctgtaattcttatccttacttctctttaggtaatttatcattccctccctctggttgcctttaaggttttctctatgttgttgatttttagcaatttcaatataacatgactctgcacgtgtgtgtttattttggtatatatcttgcttgatatacttggagattttgagtctgtgatttggtgtccatcatcaattttggaaattttttcagcgatttttttcttcaaacatttcttctgcctctttttctctttcctctccttctgtcatttcaattatggatatgtcatgccacttaatattgtaccagagttcttggatgctctgttatgttctttctttctcccttttatttccactcttttttctgtttgggtaatttctactgacttattttcaagtccagtgattatttccttagctgtctcacgtctactaacaagcccaaagacattttttaatctctttgactatgtttttaatttctagcatttccatttgatttttcttagtttccatatctcctctgaaattacctatctgatctcacatgtggtcaaccttttcctttagaacctttaaaatattaatcatagttactttaaattccttgtgtgataatttttatatgtgtcccatatatcacatgtttatgtgtattatctcttcggagtgctttctcttgccttttcatatggtcataatattttgctgaaagccggatatcttgtgtaggacagtagatactgagatagatacttttggattcttaaagaggaatagattgtgaaatggcttgccagttgttattttcttaatatttgctccccctttagctttgggtcttcccttaatgctgggccctaaagagaatgtgtctcttgaatttcttccatattcaaccatattcccatattatttttactcaacacttgttaggctgttggtagcaggccagggaggaagggcattccttgatgttctgattaagactcagtcttaggtaggtaatgtgtacctctgtatcagcaatgtggccttcacaagtgctcctgcaactttctccaattgttgtgcaaatcctagcatatattccataccccacccctggggatagagcattacttttttctcttcccctcaccacgatcattcttcctactgccaccatcaccaatgggtttcctccagttccctaagacaatgatttttgctattctctttgccaattaactcttttgttccactgggaaatggttgtgggtttgaaggtggctgctgttctccccagtctttcctgtgagtgcctggtggggtttgtggaggaaaagcctgctataggatgcactccctatatctgccacctccagtgtgtcacattttcatgctagcccatactcagccttagcaattcattaaaatgtttagctgaatcatcttgctggtttacatgacatctggtggtgtctacccaaggaaaaacaaatgatgccatcctctttcttcttgcaggtgcctgtctctttccagatttggagttgtttggttgccctacgacctaaatttgctggtgcttttttttaaattaatgaataggtagtttgtatagatttttccttatggtaagaatgagaacgacactctgaagctctctgcatctctgagcttaaatcagaagctagagagtttactctggaatttcttaatttaccaaaataaagaacttgagattatttactgtgagttatagaaatgataagggtttggtgaggatgatgattgtttggattcattgatttttccatgtctttaaatatttttattagaatgggggtactcttggctgataactgatcccagtattttctaaagtcttaaatgaaaacatctgggagtgtgagacacgaaatgttattttaaaagaaaaggtgttattccagctttgaggaaagattgctcttttagtttgacaaaagactggttaaggtctgtgtctggaacatagatgttccagtctaaatgcctttgcataacgctgtaaaaggagttttttgttgtgggcagagttgtatctttgtaaattattatgtttacttgaacttggaataaggcgtttctcctggctttcctggagtaaagggcctggaaaccatgtaggatataagaagaaagacatttcactgtgggaagataagcaaagcaacagggggtaggtcagtaactaagcagaaaggactgggtttgtcctgtaatgccagaaatgattatttttttatattcagtcctatagttttctttctacactatgattttttcccattatgtccaggactcagtaaagttcggttgcatgttaccgcctggaactggttataattcaggaaagtgaggaagaaacaacactgtccacatttggcacaacaattcagaggtctctgttaatggaaaaacagacaggcttggtgggacaacaggtgaaatgcaggggtcaaaatggtagttttcagaagagagctggtcgctggtcaaagctgctgtcattggaatacaaagcaaaaggattcagatttcttcaaagcacaaccattcaaaatattacagctcttatcagcaacatatatgggtaaattaagaaaattaatgtttaaagcagcaaaaaatttaaataattaattctctgaggtcccagtaaaatgaggttattttcaattccatcaattcttagaggcaatgaatgtccgacaaacagaggcagtgattttgcatacttggcagagattctttgaactcaatttattaatcaggatcctgtttatactttgggtggaaaggatagtcatttgttaggttaagaagaacctattctttgactgcaaagttcataatgtgaaaaattattattgagcctgttctaagaagtacacaatcttgaaaatacattgtcatagctttggagttgaaagaaatcttttcgtttatttaatctactcctctcatgttacacatgagtgatatagacaccggtgaggtcattcacccaaagtcatgtaacggtaagaatttgtaaagctaagccacaagataatttaatgaatgacgtgtattactgtaatgaaagtatacaactttagttttaaatgagcagatgccaattaacatatatgttcatcttcctcatgaatgtctacatatgcacaaattatatacacatttataaatataatagtgagaagttaaagattataaactaaaatgtttaaatgttttataattcagagtatgatactaacaatacaaatttaaagaaccataaatatttcatcagattgttaaaagatcttgaaataagaccattttataatttcctcaaaaaatactgtcccagtgctagaaaaccctgtcagaaagttttaacttacgtctattctgagtcacttttaccaacatctaattgcattttatggtggttgttttcaattctcccttcctgcattaggacattttcagcattgtttcaggaaatcaaaacatgtaaatgctttccaaatagacaacaatactacccactcaaggatatggtcttctttgactacttgccaattatttcatttatgttgggtgaggaatgcatgttctgaatccctgcatgagcacttgcaaagaaaaaaaaacaattggaaacttttactttttcagcccttatatgcagacatactggagatctctcatcttttcctccaatcccttgtttattttgagactactgtttctgagcaatgtctaggtctcttggtatgttcaaatagaaccctgctggcaaatcaatgctatataatgacctcttctagaaaaataaaagttggacatttaataatatttttaaggacatacaataagcagagatgatgacatttaaagcttgttgtttcttgttttaaattaatttatagaaaggattgtttaggttgtggtactgtggtgttatcatttgttttcagtaattttaatacatttatctaaaagccaatatgatttcataagcaagatcctctgaaaatcttaaagcccaacctggaagtgaattggtggtgtgttaactctctgaactgctggggtaccatttggtatacagttccgtgggatgtaactgtcatagtttggtcaaatagttggtgagggcttaacaaatatcgtagattgtattaaattcaggatgttgagggctgcaagtacagtcaaatccttctcacggaagcaatattgccaaaacagaagtccagactacctgagtaggaagaatggcagtgggaggggaatattaccataaaagagttataagctaaatgtcttattctcagttcttatgctataagtagggcggtatccctacccccatgtgtgtggcgtatgacatatcctgggtaataggaagaacaagaaagcagggtcagggtctctctaactatataccaacgaaccattcttggccttgctgtcatggcttttaatttgcacaagttagggaaacttgtgaactgacaagagtgacatttttcaacaataaaagtaaagttgttatctgcttattgatggactaattccatttaggaaagctttaagacttaaaggttttggcgcagaagtattgaacacaattgattattgtatagcatttttaaaatgatttctgcttgatgatttggtttggattttttgtttgctttattttttaatgtgatttcaatgctgtttttctcattttacccttgaaaaaaattatgcaagctattggaagcatttgataataaaactaattacttatggttctcttactcccacttcttctaccaagacatagatgcacagatgcaaagccagaactataactcagggacaattccagttctgcccttgaaagtgctgaccatgggaaacaatgtaaacacactaataattttaattgaagtcaattttttagttttcaaaacatttgccatttcaatagtgaaaaaaagctaaacaaaattttaaaagaaaattaccttcagttaaaaataagcagccattataaacatttttctagagcaaatactactgatagaaaactccaccagttatgcttttcttcaaaatttcactttgttatagagagattttgtctgtaagaataattttttaatattcattaacaatgcaacaagatttctctccatttttttgtatctgtggtgtttacactggtaagtacaatatatgcaattatttcttggacgtaatcatttgtaattcaacttcaacttgaaattgtccaaaaatgaaatagcaaacacatcacagtacagaaaaaagtggaactttttccaagatgacaatttaatgattggctttggccactaaaacagtcatgtgacatgtgattgatttaaagcaaatggttgctgatcagtcgctgttctttcagacctttcctgtcattctcacatttatttatactcttggctattcttatactattgttgattatctgagaaaaattctttttatctactctgaaataatctatgtttctgcaacaatgagcataattgtcaattatagcacattattcacagctcaaaatatccctactaaacagggtgcccacaacgtgatgaagtgcaaatacagagagacttcagagagatacagaacttcagccttcctaaaaagaattaaagattaaaatgggatacagttaggtgatcagggttagggagacagggtggtgaaataattttaacaaattgtaaaaattataaatttagttatcagatatgctctatgagggtagagagaacatgtatcttacattggatactcagagcctaacacacagtagccattcagtaaatatttgtagaactttgtaaagaaggagaacaagctggaaggcaggtataaggaccaaaggagtgaaatctctaaaactacaacttctcatatcaatttgttgtgaataaagacacaagcaggaacttggttttgttttgtattttgtgcttttcaaaggattttacctacagcatctcccgtgaccttcttggaccctgctgagtgaataccagtgaaaaaaatcagtttatacatccttaactttattaggattctaagctgcaacagctttgtcaatctcgtagcttaggtggggttgaatatagtagagaattgaagcccatctaggaaggaatttgttatttttactttaaccatacaaataaaaaatactctatcttacagggtaattgtgaggaaaaatgaatgcagatagctctgaagtgccataacaaaatgtaccatcttttctaaatttattttttggctgcccactccaggaagacactaaaaaatgcagataaaatggcataaataactcaccctgggtcattaggtgagtgactgcttctaaaaactcagcaatgtaaaggtacagatggaaaaaaatatatattttcttaagaataaaatcactttagtttaccaagtttgtacaattttttaaagtcttccatgaaaataagcaatattctagggagcctactgggaaaaatttcaccagatgggctcctagcccccagactcaaaactgacagcctatttaggtgggctttaaattcattatgaaagaatgtgccagataccctatgtcttccaaacaccaaggagttgcttccagttttgaatgaacactgaacaacaattctatcaaaaaagaacaaggaacatcaaagacatctggtgagtgacaaatttatccaaaagtagaacatccataagaatcctaagtcaaataaagggcaatttcatcaagaaaattaacaaatccaattaagtagatgacatcttgaatatcttcaaactggtaggaagaaaatgattcagtgtactagaaaattgggaatttaatgcaaaagactacaagaaagtttagaatttaatacacaagaaaatttattaatgaataagaattaaaatttatctagtttattctccagatgagaagatttataaaacttcatgagtttggagaataacagggatattataaagaaaagaaaatgctaaaatttttactttaactcctgattttaaaatatataattacaacaaaaatttttatatcctgttctcttgtctgtacctttccttccctcccctgattagctaaaagccagtaagaaagcaggcattagcagagggaagaagggtaactgagatagtcagttctgaaatatataaacatctgaaaagttaaatagtaaatccattgataggacaagatacttcagagacctgtcattggattagatgttaagaaagaacaatataaaataagcaaactaagaatagtgaagaaaggggaaaatcattttcagtaaaattaaaattagcttctaggtctatgaagtgattattagacttcaaaaatcattggtaagaatgtccctaacataaaatttagaaaataagaaatgaagagaaagatgttgaccagatcattttcagtgttaccaaattgggaaaacatacagattccattatactagtcactaccctttgggcttaaacaagacagtgacttattaaatcaatcatcccttaagaatatcaaattcacctgagaccagcctgaccaacatggtgaaaccctgtctctactaataagacaaaattagccaggtgtgatggcgcatgcctctaatcccagctactcaggaggctgagacaggagaatggcttgaacttgggaggcagaggttgcagtgagctgagatcccggcattgcactccagcgccgtggctcatgcctgtaatcccagcactttgggaagccgaggcgggcggatcacgaggtcgggagattgagaccatcctggctaacatggtgaaaccctgtctctactaaaaatgccaaaaaaattagccgagcgtggtggcgggcacgtgtagtccctgctactcgggaggctgaggcaggagaatggcgtgaaccagggaggcggagcttgcagtgagccgagatcgcgccactgcgctccagcctaggcaacagagcaagactccgtctcagaaaaaaaaaaaaaaaagaatatcaaactctcttatggaccaaatgtttgtgtccccctgaaatacatttgttgaagccctaacccccaatgtgatggtttttggaggtggggtctttgggaggtaattagtgttagatgaattcatgaaggtggggccctaatgatgggattagtgaccttaaaagaagcagcagcagagatcttgctttctctctctgccatgtgaggacccagggaaaaagtagctttcggcaagccatcagcaaaccaggacgagagagcttaccaggaacaaaattggttggcattttgatcttgaacttcccagcctgcagaattgtgataaaatacttttctgtttaagccacctagtctatggtatattgtagcccaagctgattaatatactctgtttgccctgatgccttgattttatatttatttgggaactggtctttgattcaacttacgaatgagcacaacatggtatagaatcatagaaattcataactggtaggaaacagaacactcacatagtttaaccacccatcttatgcctgaattgtttgagttgaagagtgactaaatggtcttccaagacacactggaacccctctcatgagaggaactcactaagtaaggtgatcgtttaaggatgatcttttttctacctcttttgtatgccttaaattttcacaatgaaagatgcaagacctacaagagaggcatgtagggaggaacagagactgttttaaatttcgaacattttctttggatttccaaatgtcagaatgccaaagataaacatcctcagattctaaagagaactaattctttaaactttcttcatcaaaaccaggaaaaatctacctctaagtatacaattttggattatattatggcaaaaacgtaagcgttggagggttatatgctcagaccagagcaaaataaaattttatagccctaaagtgacaacttctaactaggcaataagtctggctctttttttctgataaacattaacttctgcttagagtcatttaattaagtggaagcattttctttatgccagtggattctcaagaagctaggaagcagtgaaatgagagttctactgtttacattttgacaaatgtaggcaactcaggttctcttaatctggaaagcttgagcctttccaccaagataaaattttttgcattaaacaaatacaaataggaagtctcctagcatcattaagtagtctcagttccttaaagtcaccgctcagttaatcatttgcttttacaatgttttcctccaagaatagggaaatgtttaatgacatttgtaattattcaaaatatcctcccttttgcctttacacatttttttttcagatctcatgtctctgaaattcaataacagaaaacattatatgaatagtttgctttcatatttaatttataataagaaaactcagtaagagaaagatgtgtttgcagtttggtagtttgtatgcaggtcacctcctattacagtgagtgactttgtatgatgataaaaggaattccaggctcaaatccatggccccttcttttatgcaataatccatacaaccaaacaccaaccagtaaaacacataaatttgaacaattcctcagagtttgttgaatttacttggttggttattaaacacggtattcagtcaaaggattggcatatctctcagcatatcctcattttttaacaaacacagttgggcatactatactttatctgcacatactcatgcctcacccttaaaagctggatggtaactccatagaaagaatgaaagatggccttgggccaccacaatagaatcactggttataacacaaagtgttcccatactagagaaatgtgtttgcatttgtggtttttctgatgccttcaaattaatgttcctacgtcacaagtacatctgtttggatgccttatcccccttgggtaaatgaacaaagggatgtgttcttagcgcttgcttgatggaaattaatagtctgctttcatcctttccttgtgtggctttctttgagttgctctatttgcttttttccatacactaatataaatttaaaaagtatcatgactgtggtaccttaagaacactacataattggaaataaggtttaaccttcagtagagccctgaggatgttcaatttaaaatgtttttaaaaaaagattaaaagaagaaattagagatatatgccagggtagaaagctcatagaagggaagaactttcagaatgtgactggttgaagtaactaataacataagtataatttatgcttttagacttgcccagaaggtttcatattcaagacataaattccctatattttgacttttaatcatatattttctgcatgcactcaaaaattagagtgttcaacatcaggcttgtagacgtatatgaatgaatggtaagatataaactagctgaaagaattctcatcaaatgctaacaggtcacacagacaaactagtctttgtttgttaataagctgtgtacagtcagagaactgaaagttgactaaacgtttcccacaagcctaatcatgatagcatagcattaaaatccaaaaccaaaactaaaatgttatatgtacatgtgtttagaaaatagatgaaaacaaaagttacttacacttttgctccgagaaagcaaatcacaggtatttcttttcatcgtggtgttttaagtaattaaaatgggaactagtgtttccagtgtcaatgatctcactgcacgtatccactcaaaagccaactggaatgctgaaaagaaaaggaaggaaatgtttaatcaagttatgattaacacttgcactttgaaatgctgtcttagactgggacagttaattcttaaataattcatcggaacaggctaaaacggtgctgtgtttaaagcaataaaaaagtatacataagcaacatttccaaaacagcttttgttaaatgtaagttagagatttcaagcaccatctgttttccattaaatattcaactctacagttttagtggctgaaaaaaaaaaaaaacagatatgatagccataacctaaagttacatgtataaaatgaagatgcaaactgaattgtgtatatgttgattcttgttgggacagctaaggattcgacaatttttcactaagggatcactaaggtgatccactgctggaggaatcttacttacatgtgaagaaaagagccctctgagcaactgcatcattgcgtcttgtttcactgacaataatcaatagtaccttgaagccaatccaatgactcttcagtaaatttagtgagttatctacccctttagttcttagtggttgtaaggaatacttgagaagatgagaacaaaaagtataagcaataactgttaagtaagcagtaactgttatttcaaggaatattccagagtaattgccacttgaatgacattgacatcctcattacctaactaatctttgctttctcctagacactacagtggagattctccattttgagttttgaagaaagaacaaatcgaatagctatatgtgctgtgttcatttatgatattctgctacatcaggacacaacctacatatttataagatatatttgcatgtgggctgatattttctttctgggaaagaacttactgtaagggaaagaggataaaaggcttggtcaaaccacaaaaactctgatattgcaggtttaggctaatagtgtaggtgtaggctgatgctaacagcagcatgtagttctatcatttgggtttgttgtaagcttctcaaaaaacatgtgtctgagacttaaggaaaagagtaacagtgattaaggtctgaaggagctggttttgctaaaatgattgacaatattaaagtacaaagtagtatgaattatacatttaaaagataaaaaacaaagtaactatgtatcattttttaaaaaaacatacaaaatgaaagcagagaagcctgcaaggaacacagcctttttaaaggctgaaaatacttgtttggaatatatgtgagtcaccctctcaagtcttctcaaaataaaaggaagacactttgcgggaggtaagaggtcccgtaacagcaaagtagaggtagaaacagagaagtaaggttcactgtggctaagaatatctctggatgcaacttggggactcaaagggaaacaagggacaaagccttcttccaaggttgatagaaatgcttgcctgaagattaaagaaaaatgcacaatcaaatgtgagttgctaagataaatactgtttctctgagtgtgtatggattttttctaaaggagtaggatttgaagggaggagctgatccacaatggaaagttctcagctagtacacctccaggaattgaatcacctttacaaattagcatcctataggtcccagaaaatgcagaattatgttactcatgtaatttaggaattggacagaaattaatacaaactgaatgaaatattccatatctagggagaaaaaactttagataacagccgtaggaaacatatattatcagagaaaaacttattcaaaatatttaattattcatccaggatttaatgagtagccttagggacaaccatggaatagttgccctactgggctagtgactcaatggtaacaaatcagtcaaatcagacaaataatggatttgacctgataagctttgctgaattaaccaggtttttaaaaaatttgccttgaaatcatttaaagaccatcattaagagatactttcctatgggaatttagaacttagagaaatttcaataggcagagagattcagttgaaaactgactgctgatggaatggctcttctcaccctgtatagctaggaggcacctagcgtcagtaaaagggtatagactttggaaccaaataggtataggttggaatttcagctctccactggcattctatgtagcttttaggtacattatttgatttatctgaactttttccagatctacaaaagaaagataataatacacatatgtgttttcaaaatgaatgaggtaaaaagtattgtctaggagaatgtttggctcataggaggtatttgggtctcaccatcatcatatctttatcatcatccatcatcactaccttctttttctcttagtatcaaatggcaagtaaaaacagcccattcttgttttttcttctataagtgctaacctctctcaaataatacatatgtaggcagatctactttccactaaccagtatgaataatctaccagttgaaggtccaagaataaacagacagcatacttttattaggatcatttacagcaggttcaacaaagagactctttaaggagatgttggtagggtagaggaatccacaaaggatggcacagtacctggaactagcaacagcgaagttttcaccctaggagggatgggttgcccatacctaggaaaaagcatcacacagagtgggctgccttgaaaagggaagttgctctctgggacacagctagaccctaaaaagaagaagacaaccagttgcacgcagtctcattttcctttctccatctgtctcctcctaggactccccactaaccaaatgcaagcaagcaggagggcaaaggaggaagaagtacatctgactggtcagccttccagggttcaaagccccccaaggtagggcagggaggagagtggagatggaggggaaatggtagatgtgctctgcagtctatgaagaggattgcatgttctgctacctcatttatccttaaaaaaatctctataatgtatcattaaactttccaatactcctgtgaggtagacattgttaatatgttttcccatggcacaaacgaggaaatcagcagcaacgaatgaagtaaattgcccaggaatggcagaaccagtattcacacctgatttgtctgcctcaaaatccacgtttttgtctactcttccatagtgctttgctgccaatagcatgaaccagtgcattttaattatgaacaagtggtaacctctgcaaaaatcaaagctgtgcctaaactaaagaatgtttgatgaaaaggttgactctcaggaaggcagttatcttagttcctgcaagtttctctctcagcaaagataatgtggtgagactgcagaaaagctttctccctccaggtgcactaaaaagaaagccaggcgagagaacactcacacgtgcaatttcgttacgataggagtttccacataaagttaattagaaagaaggaagagtcagctcctgcagggagaacactttagaaataaaaatgaatagaggaggtggataagacagatagtgctggaatattcagagatggaattagatggaccacctatatacattttgctgtgtcaatgcaaagggaattaagacagtttctatcctagagattaaagatttatatagcagaaaatgtcttgaactggtcatcagatgaaataagttctactttcattgctacgtcatatacacaaactgtatggtattaggaaaatcccttcccttttttcccctcatatctccacaacccacctcacagcgttgttatggggattaatcagataatatctcagaaaaatttccggggactttaagttccctgcaaatataaatctatgtattgaaacagcaaatgtccccatacataatgacatccttaaatatgagtgaaaagggattccaatcatccacaaaatattagagaagctactgaacaggacatgttttatatatgtaagaagaattctttaatctcctctttttgaactaatacttttttcttctacatagtaagtcagttcatacagtaactgctgaattataaagccactcagatgcattggttttaaaaagtttattgagcaccttatatgtgccaggcacagtactaagctctcagataaacaacaaactttcttgatgcaaagggaaagaattgtttgggtacagttgcctctgagtgatcaaggtgtaatggattagctctgtctctaacttactgttgtctccaactcatcaaaagatatatttttctagggttgcataaatgaaaccaaacttggcagtttattcccttgattagattctcatctaaatgaagaatgaatacatgtggcatgtataaaaagagaagcttgatcacaatcaaagacaactccaaaggaatataataaaaacaggcttaatttatcaaggtttactcaccaaagtatctgcaggaaggaaattaggaggaggcaacacaagaattaaatactcaaaaagttaaaagaaaagaaacatacaaggatggaataacagatttttcatgggaatggttgaattattgccttgggctcttaaatgtccactaatttgccctctacacacgtaagatagataatgtgaacatctgcttcagttggccctctgctacattggtagcagaaacaagggaagaaagttctggatatctcctcataccttctaaaattgtgaattaaaagaaaggacttcttattccagatctaaagatgacaatagagatttcctgctatttacattttctctcttttctctagagtgctgtttatctgaagctatgctttatctgagctcctgctagaggctatagaatctgagatttagaaagaacgtagagtacaaatagggtaattgaagtatagggaacataagtagtctgcctaaggtcatagaactgcctgggacaacacaataatgagaggaccctgtattccatggccattgctgtggctagctgataatattgccctgtgcatgcattttcctaaaactagttttatctgtcaacccatcttgtagtcttcccagcacagtttaacatcttgaaacttgccaaagtcagtgcaatctacctgtaaccacaaggatggctttatataatcaggttgtagcttatgctcagtaggaactccagagtgatgtgtttcaactagaagagtcaagtgatctgtgatttgcatgcttaatttggccttacctcacactgtatctcccaacaccagccctctaccctccaggctggtctcatctctgccgcacctgagacacatccatttctacctcttggccttagattcatgccctttaatttttgttctcttcattttacagaactcttcctattcaaagtccaacaaaagcccttctttctaataacaacttcccctactgcgccaagtcacatagatttctactgactctgaggtccaataacaaaaagtatgttgtaccacaaactcatctactagctaacatttttttttcaataattgttttatgggtttaatctttgcttcttcaactggggcattgatatggtttggctgtgtccctacccaaaatctcgtcttgaattataatccccataatccccacgtgacaagggagaaaccaaatggaggtaatggaatcatggaggctgttttccccatgctgatctcatgatagtgggtgagttctcatgagatctgatggttttataagtatttggtagttcctcctgtgttcattctccttcctgcctccttgtgaagaaggtgtcttgcttccccttcgcctttcaacatgattgtaagtttcctgagacctccccagccatgcagaactgtaagccaattaaacctcttacctttataaattgcccagtcttgagcagttctttatagcagtatgaaaacaaactaataatacagggttgaataaggtacattgtaaagtctcttccatactgcaagttgtatgattaaaaaatataacttctaccaggcacagtggctcgtgcctgtcatcccagcactttgggagaccaaggcaggtggatcacctgaggtcaggagtgtgagaccagcctggccaacatggtgaaactctgtctccattaaaaaaaaatacaaaaattagctgggcatggtggcaggcacctgtaacccagctactcaagaggctgaggcaggagaatcgcttgaactcaggaggcagaggttgcagtgagctgagattgcaccattgcactccaggctgggtggcagagtgagactccatctcaaaaaatatatatatatttaagtttgaaagcaattcattatcattcttttgcctttgccatagtattaatatgtaacatacattgtaccatttacaaaatatgttaaaaattagaggtataaatctacaaaaatgaatgttttaattaataagtagaaattttgcaaaattggaaataaaattatatcaaaatatggggtatattcaatctcactattaataaaatgaaaattaaaatctcaagatttgtcttgcttaaaaattattttacttttaaaaataaaatacttgaaaatggtgtatatataattagatatgcatttcatatattgctgatcaactttccaaatgacataagtctttggataggaatttgataataagtaccaaaagctttaatggtattatacacttttatatcataattcaggaagtaacttgaaatatggaaagtgctttgtatgcagaaacattccagcagtgctacttaaaataatgaaaatctggaaacaatttagatgtcaaatagtaaaggaattgctaaataaaatatgagaaccttcatgatgtactatgtaattaaaatcatatattttgcaagatatttcaattatatgagaaaaagcttgtgttataatattaagtgaaaaaggcaggattaaagttgtatgtgtaatattatcctataaaaagttatgcacagagaaaagactgaaaaagttagcaaaatattagtagttatatttaggtacagtattatgggtagttctgtctcatttctatgtttcttggcttctcaaattttcaacacttagaaaaaatacttaaaagttggattaaaagaaagtatttgagtgaatacaaaagttactcatctcttcttacttcagaggacatacaaaagtgctagttttttgttcgtggaattgttagattgctttctcatttgtttgtttttcagtgctcaagtttgctatttcgtacccaatgttagactttgtttttgggaatctatagactgagaaaagccaagttggaaaacagatggctaaaattaagttctctcttcctgactctactattttcatcctccatttgggtgtcaattaacttacctctttctttcagatctagtaatggtgtctataaaaggaaaatcttcaggttccacttcacctaggaaataaattaggtgttgaggcctccctgcctgtgctagtttccgggaatgcaaaacacatggaacatgagacaaatgcaaataaacaactgaatcagcaagcaagagatttgggttttataggaccaacaggagctcaatctacaaaataggttcatattattataagttagaaaataaatgcaatatgggtggaaaaagctgtcacaggccgggcgcagtggctcacgcctgtaatcccagcactttgggaggccgaggcgggtggatcacgaggtcaggagatcgagaccatcctggctaacaagatgaaaccccgtctctactaaaaatacaaaaaattagccgggcgaggtggcgggcgcctgtagtcccagctactcgggaggctgaggcaggagaatggcgtgaacccccagggggcggagcctgcagtgagccgagattgcgccactgcactccagcctgggcgacagcgagactccgtctcaaaaaaaaaaaaaaaaaaaaaaagaaagaaaaagaaaaaaagaaaagaaaaagctgtcacaattttcaagaaaaatatttttaaaatagtaagttaacaatagggctctttacctaggtttagtttcaaccagctttgtaccctttcaactatttgagcctcttaatgtctctctgaacatcccatcaaaaattatgcctcagcttccttcctcacccagcttactctcccttacctcctttcccgctgtctgagaggatgagtgaggtgtttctcctcctatgaggagtcctgtcttctacctatgcctgtctttcctcctccatctgctctagttctaactggttctctcccctcaagatctaaatactctcttgagtctctcctcttgtaaaaagtaaattatccttataaccctatgttctccctcctcaagatatcattctctttctcttcaaaatcaagctatttgaaaaaaaatgtctgttatctttctttacctccttattcccactgtctacccctcaacccaatgcaagcaagttttactccttccacacttaaactactttctctaaagatcctagacctccatatcacaaaatctaacaaacttttcacaaattatctgactagaactctctgctatcacattgttttgccttctagaaaatccctcttcctctgtcttctgctggttctccaactgactgctcaacttcttgctacttcacggggtcttcttattttgtctacatctaaaatatgagtgataccattgatattatttttatcagcatttcccaaacatgactgcatatcaaaattagctagggaatgccataaaatgcagatggctgactctccaccaatgaatcagaactttgaggacaggtactcaggaatctacttttgaccaataccccagataataatcatgaagggtgaagagcaccaccacttttgattggcacttgggagcctctgttctagattatatttcttgataatccactagttttcattgttttagctgccatgtgtatactttaacccgccacatacatatctcatacactaagaggggtctaccactaccacagtcttccagagttttatctacacaaattcaggcactttctaatgttcttcttgtcaccaatactgcctacttcaagtccaccttaaaatctatcaatagctgcctatcccctacagcataaagtccaaataaatctcctttacatggtaagtaggagtccccctgtctgctgtttgcagtatcatcccttgacctcccacacagcattgtttcactcacttgctatagggaaccacttgtaattctttgcatacgccatacggtttctcacctccctgtcctctgtcttggactttttcccctcttcctttaccccatagccatgctcttcttcctttgtttgggaatgtcttgcttcaagactcaactcaggtgtcatctcctcctggaagagtttcctgattctcccaatatcccagccccattcccactgccagcctgacctaacatccctttttactccctccataatgcctcctgaatgcctcccacagtatatttgtcaaattacatcaaaatgatctgtttaattgtacgtcactgccaaccttgccctggactctaagtcccttgaggttagaaaacatttcatgtttatatatacaattacaacataaaatatgcttagtaaatgtttactgatttctgctgaattgaacagagaattaagagaagaaaagcacattttgtctccagactgaaaagaatcaaatcatttcctttgtagtttatgtccatataaaaccatcattctattcccttctcttcctccaaaatgataacagcaatctattttactaattcattcaccagacatttactggacacttgtggtatgcaatgaactgtgctctagggtccagggatgcagagataaatacgataaaaatctctctccacgtggaactctcattctagtgggggacagagacaaataacacaatacactaagtgctctgacagaatctcagaatagctggtgtgggacccccgaggaggcagtaaatgattcatacacctaatggcttcaaagcctgttccgagttattctgctcttgtgaacacttctctttaagttattcaaatgccatttcatatactgatgtttttccccacgtagagggaaaggaacatgaaagtagacattgacggttcttttcatctcctttgtgcatctagtcagaactttgtccctgtagaaaaggcatctgtagaattccacacctataaagtatgctgtaaatgaccattgaatgaataatatgcaggcggtcacacttacatagagaacacaagccactttttatttcagcacaaatttattacaaaataaatgacatttttggaaatacaagcatatcatttggctccccaaatagcctaattcttcactcccaagggtatggaaatgccagagtacccactctttcaacgctcaccttgaccagtatttcaaaatggcacagttcagtcattgagctataaattaattacttttctcccaggattccatttcctcccacctaaaataatttcagctctctaaaacacaactctccaccctaattaaaagtccagggaccttctcattaatattgcataaatgtagggtctgttgcttgataatactttgctttggtgttagcctcctgcagcagagaagaaagttacaacaaaagcttccttttagcaactttcctagccatacaccctcccactgcctcattatggtgcccttcctgcctgggcagtgggaggtgtctagagcagtttcgtcctgtgaatcataggacagcatggtgcgtagtttgctggcctgaggcccaatatggaatgagcctctgagatgtgtcatcatcagcttgactataacagatccattgagagcctcaggataaaattccctgagtcatcatgaggaaaataaaatgatagcaagatgatccccataaaatctctggtgcaagctgcttactagctacaaagaaaagtggagttcatcaaggcactgagccttttattctttttaatgtttttttgtcccatattaaagtaaaatctgctgtctgaatacttgtaaatttgagaagtattagaaatggcatttcactgagggttgtagaatgtatgtagagactgctgtctacaaatcattaattacaaatcatagtctgtactttgtatcatgagaccaactaggttctaaaacatgaaccattctgcctctctggcaaaaacaagataggcagatagatagatagatagatagatagatagatagatagatagatagatagatagacagttagatagatagatagatagatagatagatagatagatagatagatagattagataggaataggtagctgaaagagagaaggaaaggtgagagtgaggaatagtgagaaattgagaaagacaatccatgttatagatcctgcattatattatgtatagctttctcaatctgagctatagaaccaaaattattatctctgggtaattatgagccagataccttcagaagttcctttttaaaatcaacataccctttggttctttagttgcttttatttagtcaatcagccgtgaattctaatttttattttcccacaaaatctactgtgaatagcctccttaagaaaaatacaagtgaattattttaagacctaataatactcttggtttagattatttgggacacaatgagaatttaaataaaataaaccagagttaaagtaaagatcaaagagacaaaagggaattggtagagcatcatgcagatcttacttgaggtaggtacataaaagttgttctaatgcggcttcagtagaacaacttttatcctagcaccaagtaagtcaggaagtaccctcaagctatcatttctccctaattaacaagtgctacccaaggagtcattgccggcagactgtacaaacagaagaaaagcaaggcataaaatgaagaaactcaatgttaattaaaagaaacataaacaaggaaaataacagagccaagaaaccaaagactatgagtagaaaccaaaacctctcaatcctctgtctcttaggaagcaacagcccgttagcgcccttgcaagggaatgagcccactgtggtggagtcattaacacccacaaattgaaaactgtacatgccccttagtttggagcaaatttctaacgaatgataaagagcagttggcttttttacattaaaaataaaataacagcagaaaaaaaagtgggcaaagaatttggattttttttttttttgcttttcaagagttttactgttttaccaatttattatagacattaaaaataacaagcaacaaaatcaagatctagtacagcataaattataatatttttctgccattagagaatcattttcaatatactctttttctttcatattcagtgtatatgtggtagataaaataaactccttcaatgtagtgccttgttttaattcctttgttcttaaggagatatttttttctcactccattataaaacaagaactctaagatatcccctaaacaaaagtaatttatgtaagagatgttgattcggagagatgaagagacaaaactaatcagtggaatattaggttttggaatcagtcatattccatattccaaagaatttggagtcaaattctgttttggccattttctaattttatggccatgagaaactacttaacccttttgcatgtcaatgtcaggatcaagataaatgtagatactgaaactcacatttcaaggctactactgtgtaaactaaatgatgaacttacatgtcagcgtatataaccactgtacctaactctaagaaggcactccttaaatgtaagctttttattactttgtcccctgatatgtctttaacaccaagagcctcagcgagctctaagaatcaaggtaaattacagttagaattaatccttcgaaatgtaggataggggagctcaaaatttattgtataacctggtggcatagtgagaagccttgaatttggcttatccttctcatcttagagtaagcaagcattgggttttttaggagatctggattttactaaccctgcaaaaatgtttcattaaaaatgcactcttcccaggattgttagtctgctgttacactgccacaaaatgagagaagcctgtactaattctagagacactcaattatagtacaagatttaaccttcagtttctgtgtccaagcctaggcttttccacagccatcagtgaggtcaaatgaacatttcaaaccttatactcagagatttgaaatccttttcattttgatgcttccttcttcaaggactcattcaatgagcctcaaaatgaacccatcacttttccagcaagatgtgaattgtgacaccaactcttaactgctaggacaaagcagataccaagcttcatagcaaattcaaaggctctgaatatagagaaagaacaagtggaggacctgacacacagaagaaaattcacctcagttcaccaagatctcctgattatccaaatagctgttcagagcttggtatctgtaactggagcctgtgctgaatcattgccatttgtgtggcacccatctggcacctggaattagattttgctctctcttcattcaaaatggtgataagggatgaatgagggattgcacaacagcaaaatctcataaatattattgtgctaatagatgaatttcttagtgaaaatggaaaatggcaatttcttttctaaggatcggctacgctttaatcatctcagggcttattagttcaatttttcagaaggacaatgatgcttgagaagctagaattttctctttaaaaatctctttaattcactaaagaagtaatataagcgaaagcatataaatgaaaaagtaaaaccaaatttaatatctgaagtagaagtagctgaatgaaagaaacttagtattaaaatggtctttcagtttctaactcatccaaactctgctaagatgaagatgatgtcacaacatatcataccataccaagatattgttacagattatctcattcataaatattactaaggaaagagaccccatattcccagcaagagttgggtgccaacctagttggcaaaaacagatgtaattcctattctttgcttatggcaagagaacagaattagagtattaaaccagcttcagatacttcaaagtggaggcaggagagacagacaccaaatcatcccaagagcactcaattggaaaatggcacatgaaccaaagtccacttcactcctaacactatgagaacaatcataattttatattataattacaaacgcttatggggcatttgctatgtaccaggaaatgttctaatcacttaaaatatattaactaattcaattcccacaaaattctgtaaaatagttgtcattttaatatccaatttgcagatgaagaaatcaaggtagagaaagctgaaataatcatcacaagattacatggctagtaagtataaatccaggatatgtatgttttctcctgcacccagaagttattttatgttttagggaagacatcagaagtcattgaagaggagaaaaacagttctgatatatagctcaactttcaattatttacatactgacccaaaagaaactattctaatcccgaaatgaattaaagtttgggtgtttttccccacctcattaatgggaacaatggctctacagctagaatctagagctagaaaatttgctataagaaataaaagccacattctttaaccatagctgaatttcagtcagtacatttgactctactgtagatgacagtcaatgcaagtatgccagacttccagtataagatagaaatttcagtccatttatttcactctccttgctcccaaattcacttagaagcaagaaacaatagaaaactcatggagaaatgccatcaatttagggaatttctgtaagacagtacacaagatccatattattcatgagtttacacactctggaatgtgagaagagtttaatagtaagaaacctattaatataactcattaaagtaatagaccaagggaaaagaaaaacacataatcctttctaagaatgtctaaaatgcatgtgaaaacacttaacactgaatcctgatttttaagatttaataaaacgggaccaaaagtcatatctttctcaaatagccaatgtcttgcttagtgatcaaagatggaagacattctcattaaagccgggagcagcagaaaaatacccactaccaccaccctcagttgccaatgtgtttaaagtgctagctaataaatcccataaaggagaatcataaatattgaaaatgatgaggcaagtctatcactataggaagaccacaggattctctacttgaaaaacctcccaaaaagaaagcaaaaaaaaaaaaaaagaaagaaatagagtttttttttttaagttaagtaactgggttgattacaaatcaaggttttcctatataccaacaatttgaaatataattgctacacacacacacacaacttaaaaactaggcatgaagaagctttcttaggttttgtatgcttgtttgtttagaaaggtagagggactatataaagaaatgaactacaaaacttcattgaagtacataaaaggagactttttttaaaaaacatgtttctaaagaggaaagcatgtgcaattccaattacatgcagttccgatctgaattatttacctaattatttatataaagttttgttatcgtcactttcacacatacatgcaagcagagtaaataggatcatgagtcccacattcccatcacacagctacaacaatatcaacatttttccaaacttgctttatttacccccaattgcaattcccccttgtctcccattgcttgtgtattttaagacctcatataaataaatgtaaatatatccagaacatttctgaaagacaatattaacaaaggagtaatttctgtaataattataataattgatactggcaccagactagaagagaatccaatagaactgaacagaaacaccaaagagatacaactatacataagaatttgatatttgacagagttaacattttttatcagcatatggaacacaggataatcaattatactgggacaacttgataatcatttgggaaaataagccttaagacttatattatgccagaataaagtccagatgaattcaaactttaaatatgaaaaaggaagctatggaaatactcaaagaaaatatatgtgaacgttttatttctctaagggtgaggaagatctttctgagcactatatatgccagatgcttttctaagtgcataaactatgaataaaatgatttcattaattttatttatctatttatttgtttttgagacagggtttggctctgtcacccagactggagtgcagtggtgcaatcaaacctgttgcctgggctcaagtgatcctcccacctcagcctccctagtagctgggactacaggtgcaggccaccatactgggctaatttttttaaaaaaattttgtaaagatagagtttcctcatggatcccaggctagtcacaaatttctgggctcaagtaatctgcctgccttggcctcccaaagtactgggattacaggtgtgagtcaccatccccagcctgtgatttaatcaattttaaaacaaaaacttctatatatcaaaaaattttaatatacaatacaacctgggaaaatattacatattacatattttatagttaaagaggtacaacatggagaactcttaaaaatcagtaaggaaaataaatatgtcccagtagagagagagaaaataatcatgaatttacaaaaaaggataaattaaaaattttaaattaatgatatggaaaaatcaaccatgcgagaaaacaaatgaataaaaaataaaataaggagatgcctattttgtctatcagatggtacatgaaaagaaaaaaaaatacagttttgaggcactcatttattgccagagggagtatagtcagcatgctatttctagatatttgatgtatttggcaaatacatcaaaagcctgataaacacacatgccccttgaatcagtatgaaaaaaagacacatggatgtgcaaagatgacagtcaaagccttgttcataataataaaaacaatgtgaataattttttgagacagagtttcactcttgttgcccaggctggagtgcagtggcgcaatcttggctcaccgcaacttctgcctcccaggttcaagtgattcttctgcctagcctgctgagtagctgggattacaggcacccaccactacgctcgactaatttttatatttttagtagagacgggtttcatcatgttggccaggctggtctcgaactcctgatctcaggtgatctacccgcctccacctcccaaagtgcagggattacaggcatgagccaccatgcccggcctagtgaataaattaaatacttaacaatagcagattacctaaattagtatcgctataaaaatgcaatggaatgaggctactacagatgataatgtatatgaatatacaggtgtttattgtaataaatagctgactgaggagcacagattacaaaactgtatgtagagtgtgatcccatttctgtactatgcctcaacatctatggaaaataatctggaaggatatacctcaaaatttgatactatttagtactggaattatgggtggcttttctcctttaatttctgtgcctaatgtaatctaatttttctacagcgaacacgtgggctatttctatcaaatatgtttttaagtacagaaaaagtatatacagtaatagctttaaatgtaattcgtagctaaagatccaaaaaagttgtaggtggaaagaatgatcatgaaattttatagtcagaattgtgttgatgcttctcatatgaaagatggtgcaggtatccatgccttaactggagataggatgtaatatttatgccctagccaccatcctatgcaaggtaggctttgaaattcaagcataattatagaaattcaaacttagaatcatttcagtcagttctgagtactaacaaagttaatgaacacaaaaaatcttgaaagcaaaagattaacatgtttataaaaatgaataatttttaaatttgccaattattgttcctgaagtgagcattagtttacatctttaagatgcaaagtttcattgattgaattaactgtatacaaaagcacttgccagcacatttttctgtaaattaaaagaagaaagcaccacattgtttaagggtaagcaggcaggaaacagccaggtgctgtctcacctctcactatagcctgtggtgtcttttatctgtctgtctgtctatctatctatctagctagctagctatctctctatctctctgtcatctatctaatctatatctctctatctctctgtcatctatctatctatctgtctctatctgtcatctatctatctatctatctattcttcttttcacaagggttgaaacctgtggcttccctaattatctcaagcttagcccagacttgtgccctggaataatcctatttccaatcggaagtaactgaaagagctctatacgaatgggcatttagagaatgaaagcaagcagatatttgttgagtggcagcttcttgccagatgaagtctaattagcttgtatctattatttcacttagttcttcaaaatcaatgggctggatggcatttcccgcattctacatatgatatagcaaatctaagataatcacatgattttcccaaaatgtcagaaataacaagtggtagaggtgagatccaaatccttatctctctagctcaaagcttttgccctttccaataaactgtaaagactcaatttattttgtatcaccttttagtacttgaaggtgggatagcctggaggataaacacacagactttttaacccagaatgcttggattaagatgtctattctaccactaattagatgtgtagctctgcaatgctattccaccttactgggactcagtttactcccccataaggtggggatgatagcagtaccagcctttaaggattgatagagttaaaatgtgtgaaggacctgggacattttctgacatatagtaagcatcaataagtgttagctatctttattattattatctgtggggattattattatttttgtagccacgtgtgccccgttttcagcagctggtccttatcatactcccccaccttccttgtcttccaggtttctgcctgagagctcctttaagcctgcaactctgatccccagctcaaaggctaggtccgctgtcagctgccaggcctacttgagcccagcttcatgacccactgcctggagcaccacaaactggccacactcaggctctgtcttcctgtgatgggccggcccatggggtgccacctgtgagactttgcaggactttgcccagtgacagctggcttagatgtgcaactttgcacttagcactcctctttcagtacattgcactctgcttgcaaactggcaaaacatccttttgtctctaccagtgggacctgcccctacccttggagcagatcttgttttcaaattctgataccacaaaatctaaaaatgcacccagcctgatccacctattatccactgaactgaagccagcattcaaagggacactaaagagaaagcttctaaagatagagaatgtggatcctccccaaccttcagaacactccaaaaactttcctgaaaaggcaatagggtggggcatggtggctcacgcctgtaatctcagcactttgggaggccaaggcgggtggatcacctgaggtcatgagtttgagaccaacctgaccaatatggtgaaaccccgtctctactaaaagtacaaaaaaaaaaaaattagccaggcgtggtgatgtgtgcctgtagtactcgggaggctgagacaggagagttgttcaaacctgggaggcgggggttgcagtgagcggagatcaccccactgcactccaacctgggcagcaaattgagaccctatctcaaggaataaaacaaaaaaagaaaaggcaataaatatgcatgacagggaaaaatcataaatgtacttcattttgaaaattggacaaactgcacagtattcaactaatgtcattaagtgaggtatctccagacatggtacagttccacacaaagaaattctatcccagtgtttcttgaaaaaatgctgacttctgcatcctgaccctctcagcttcttttcttgccaccaaaacacattcactggcactttgacttatctcatccaaaagacggacttgcaatgtaacccctgatttgaagtcacctgtagatcatccctagcttttgccacctttaatctgatgttaaaaaatgcttaacactgtctcagaaattcaaagccttcccgattacctttattgctacaggcatatcctcaaggaaacagcacagggctaaagagaaaaatatacatactctaaggcttcaaaggacagatttcccaaccttttctagtgctctagaaatggaatgatgaattatttggccttgcaatatacccaaaatttcccatgctttgttttgaaatttctaaatatttgcattttcattttgctttttgaagatgcatactttgtacttatactacacctttcatctaaagttctcaaaagtgttcatgcaaacatttcacaatgtggaagtttggtgttcaaatttcaaatataacagaagcaaaatcttccagtgactttctgaaaatatgtgtgctcataaaatgcataaaactaatatcagattggaaggatctgctgctggataaaccacattttactatctatcctaaaatgatgtcattgtttctattaatagcaggactcatacctatacaggatgaaaagccaagtatttgtagggcatctcttaataaaacaacctctactctacaaagtataggcgggaaagtataagacataaatctctttaagcacttacaatcttgtttagagagcaaggctaacactagaaacaattatagaatgctacagtctgtaattaaataaggattaataaattgtgtggtacacctgataagttcaaaagtaattaagaaaagaaaaatgagagagattatttgttgtaggctagggacatgaaaacaaagtgtgtaatttacaggtggatcttacagataggtccataaggtgtatggataagcaggaaaaaaagaatgacattcatgcctgaaaggaacatcagagaagaaataagaagtccctgaagcagggcagactagtaaacgggtgcctaacgcaggaggggtggctaataaggaggaaggaagaaaagaagaagagaaacttcttgactagagcagaggatttgttacaggcagctgaggtaaataacctaagatggttaaggggaaatgagactatatgaggctttgagtgccttgcttggcacttgagtgccttagcttggatttgatccagtaggaaaccaatgcagactcttagcaggagaatggcatggcagggccctactttaagacgaatattcagctaacagaggatgaataacatggagggtagtctaatcatttatttgttgttttctaacagaagtccttattttacagcataacttgaaaagatcataaccttctctcataatttgtgaaaccttgagtaattaaaaagatgttcagaatttcagttcaaataggaataatgtatttttacactgtttttataagaattaaaatagatcatatataagaagtgattgagatatagtaaacattctctccccaataaactccttcaatattctaaaaatattcagtgatgaggtataaatgagattctgagatttagacagagctgttacatgaagtgttcagaaagttatagaacaatcacatttagtattgaatcaatcaatggtctgctcttatttcagtgtgatcgacatagacctaggactcttactcattccaaatgacttcattaataagtcagtatactgaattttgacccaaacttaaatggggcaagtcattatagcatttctgctgctgtgggtataaaccagattaagaaataaatgtatcgggcttctaactgttcatttgttctttcagatacttattaagcacctattaagtgacaggcattgttccatgcatgcaaaatacagcagtgaacaaaaagaaaaacctctatattcatttaccttatattctacagagggaggacagatactaagttaataagtaaatataagtaaaatgtgtaagtgattagtgagtaaaatacattctgtgagatggtgatatgtgcaaagacaaaaatagagtgtattagcagtagggattgcaattttagatagcatgcccagaaagagattctttgaaaagacgacatttgagtaacagcttaatggaggggcaggagtgaagcctgtaagtgtctggaagtaccttggtgtgtctgaagcacagctggggccaagtgagcagggaagagaggagtagagaagagttcagagatatcacagggtgtatgtagggttgaactgtgtagttacggtcttgtaagttttggctacagcaaatctatgggtgcacagccccttaaaaagaaagccaaagagaatagcaggacaatggctcccccttagaggtgtcatgaaaaaggcagaaaagggcaccaagctccaacctggcagcaccaggtatgctttcccgccagtgctgccagattttaaatggcttcccccagcacccagcctcagaatcctgtctcccattgtattcttataagcagcaacaatgatcagtataacaaagtaaaaatatagtcactgtggtattaaacatcattaatgcatcaaagtgcagtctatctgtggactagcaatggcaccaggctgccctttgagaaccgttatcctagacctgacgggacactatccagcatgcagaagttgccaacaagggcaagggatgccagcaagtgcaggaggtgccggcaagacagatgggatctacaggaaacctgcctcacttgggttaggcagccagtgacaagcatgaaaaggtgaaggaaaaagcaactcaaagctgataaattaaaaccagatttctgagatctttgcctttctatcaactgatttaaagccaggctgcctggactcttattttcactgagctggaagagaaatctgtgctggaaacctctatgtacagtcaaataacattgccagcaagcccttagaaatcctgcttgtccccaaggaaagtattttttctttttttcttttttttttttttttttttttagtgttaatgagcaggtcgcctgggttgctccctgtatagcactagaacccttatactttaggaaattaatcaggaaattcctaatgatacgtagcttcccgttttccagagacaaagaaaattatgctgttgaaatgttaaaaacattgctatgtcattcttttctctctggataacaatggagattttggaaaagcttcctgttggcaattctgccattcatctaaaaaacaaacacactagaattttagcaacacttcaatccagcaaagggcctattgttgtatggcattaaataaaatagaggaagaatcaataatgataatgtcacaggatggtaaaatgtcatcattatcttatggcaatttttgcaacatcattctagtgtgggatttttttcctagtttgggcatagtattcatcttctgagataaggttaagaagttattacacttacgctggcagagagatgagaaagagagccggagggaggagagtgggaggagaggaaaagagggagaaagagggagggggagaaaaggagggagagggaaggagggagacagaaagatcatgaaggcaagtataaaatggttgtgttttttaattatcttgaacctaatgaagtgtttgctttaagttgggaaattctctgcaataattatcttagttgagaatttaataaaagctaccatcagaaaccttgctaagtaagtaaattacttatttttaagtaattacttttctatttatgcagctataaggcaaaatacattgaaaagaaaggaaaatacacagcagctcagtcttatttccctcaatgtgaattgaaagcacaaattttgagatccatactaacttagaatctacaaatgtcaatgtagattctaaattgggaaaaaaataatactgccagtttccttaactacttaacaaatgtactaaatctaatatattaactcaaaataaaagcaaagctttagtaaaactgctatttgtgacaatttttagtaattgtccaggtttttaaaaaatccattaatgttggcaaagataaactgagaattgaaaaaattatatataaatcctcaagcttttgattttttgatttacctcaaaaaagagatgtctcatttgttttttttttaaaaaaacaacttttaaaaccacatgctaaaataaagaaagcagcctcattaaattataaaatcaaatttaacttttgaaacagcaaagtaatcaatacatagatgcattcaatccttaaaacaaggaaaataaagctgcattccaccaggaagcgaattaaattattccagaccaactccttgcttatttagcaaaagatagtaaaggctttcccaaaaaggaaacaaaaatatctctgaagtaaaaaaggatacacccccctccccaatttttttaacctggaagctctttgatgtctaagaaaccatgttaattaactgttttaaaacctatttcaaacctcactgtttatgtaaatactcatggcacggtattatttttatagggtttcctaatttttttttttttttcagaaatattagattacagcccaggtagttctggtaggctacaatgtaggggaagatgaccaggtggcctcagggaccaagaacagtttcactttggtgcttctatttctaacagctgcgtttccatcctaatggtggatgctcttttatggcaggccaggccactgcaaatggcccaagctgagaagcggcacagccacagctggcgggggcggagagcctggcgctgagcctgcatgggactggggcggactgaggggcgcgacaggagccggccaagcccctcagccgctttctctccacctgggcgctggaatcattgagccctgtcactctgctgaaatgacagaggtgtcctccgagctcggtgacgctcagtagaccaagaacgaaaccgtcattccggaaacacagctcctaatacatttctctgcacccagggaccctcacattagctcgtagatgccatttctgtccctggaggttgaaggagtttgtgtggactttaaccagttcccaggaggcggaaagaaaacgggtcaagcaacatccattttgcagattggggagctaatgtacagagcaacccttcacagggcactggggacgggtccagatcccatttcatatggcacaggtctctaagctgtcctcaagagaaagctacttgctttaagaatcttgggggggtggggtagggaatatatatatgtatatacaaatatatatatagatatatatgtataatgtatatatacaaatgtttatttgtatatatgttttatatattgtgtttattacgcgttttatttgtatatttttatttatattatatgaataacatttttatatattttttctcatttaatgtttccatatttgttgtctatgcatcatatgcatattaaaaatgaaaaacagaaaagagagaactagaaaaaaattaaaagaagatgttacttgtgaaactgtgtgtgcttccctacccctaccctcattttcgtggtttattttggtttttaaattagctatttgggtggtagcaaatcacccacctgaaggtacagtatttactggtactctatatactgaatgaaaatgtcttaaaatatttcctgagcatgtctttatgtaagaacacctgaaattgtgcataggctactttttgaatccatgattaacttaatttcaaggcaagaaatctgtgttttggaggcttcagagtgactgaaagaggctcataaatctagaagctccccaagcattacttgcaaaaggaagatatcgttgcatatatatgtaatttttaaatgtacatagcagctgttatcatgaattttagaaatttattttaagtgtcactaaattcatagtagctctttgtcattatatatatattttttttctcaagtaacacattctaaatatgtaattattcttatgtggaactgtcacagactggtaaatttgcctgcttagcatccattttctattttctctttttataatagaaaaatcataactttctgtgattctcatggaaaaatcctttccatgttttgggtgtgactgacaagattccctccaccagcaggatgggcatgtaacccagatttagccaattggagcactctatgcttacagcctgcaagtgattggtgcagtgaaaggcacctgacctaagccaggccaatcaatctcttccctaagatttgacctggggatactagaagagagaaagttctcttcttttgggatcagaagttgtaagcaatatgtaggtctggtttccagagttcagtttttcctagtttcatggaaaaagcctgcctaacaatgacgccaatacagagggcagacaagcaaagcaaaagagggagagagaaaggtttaacccgattgcaccacttaagcagctaatgctagatctgtccccactgcacttaaagttgtatgtgtcaataaattcattttttgcataaatgactttaagttgattttctgtaacaaagtcttgcctaatactaggggtacacagaatttttgttactgaaaagatgtcatactacaaaaattgataactgctgcactacagcattttcccattattatccacttccttcttcctaaacttttgttcttctttggttgccataatgctacattttcctgcgttcttcccttgaccccgtgaccattcatccttagtctcctcaattgtcccttgaatgttcatgttctcaggtgcttctcttctctatagatttccttatccatgtcatccatcttttgtctagtatatatgatgaattggtcctcaacattaatttctcccttcttccagagagctcacctgtattgtggagtctggaaaggcaaaaactacaattatcagactactttgcgataagagtttcaaatacatattagattccaccagtttcatgtgctctagtgagacagctggcagacagaagcgaagcaggggctattttcctattgctttggttattgttgctggcaaataggggtgtggaaatattaggtttggggcagcaatggccctgtgtggagtcactgacaccatggtgtctgaagaattgtagcagccatgttggtggcagcctcctgttcccaggatttccatcatactatacgttcttgaactccaaaggttcacgggcagccttctgggatgattctcttgagaccagtcggatggtcttgttctgggagtcatttctggaagcctacctcttctcccctcccgattcttttcgcaattctctgtaaaagctaggaaagtttgccattccatttcttcaaaattctcttcccccgttgacaacagaataaattttttttaaactttttttatagtcaataaggccaggcattatggagccactgcttccaagagtagccttggctgctgcgtttctgctacacctttacacaatgacaagccagtcttcctttatgcctctgtcattggcacctgtcctccattttcctagacctccctctggccctcaattgccctgtaaatctatgcagccttctcagactcgtccagcgagattaggtgtctgtaggcaccataggactttatgctgaatgcttttagaataatcatcttaatgtattataattttgttttaatgtttctttcactataattgaaattaattgaggtcatgggaagtgaatttttcttggtttcccctgagcctatcatagtacatgatacttaaatgaacaaggtgggaattaaaccttccctcaatttacgaaccattgcagacgctcaacttccatatcatctccttgagagagatgctaagatcacaaataaaatgttttctctttgagaagagagtacatacatatgaaaactttattagtatcacttctcatgtagcctccagaaagttttctaccaccaggcaccattctaaatcatttaaagccaaggaaacgtcaacggtgtcctgaaatacacacaaactcaattctgctcatgacctagtccacttttctattttctccagcaaattcatagaaaggagacaggatactttgacaatctttctcttgtgttatcttcaatactttctagtttgtgtgtttacataacttatagaatattttttaaacttgatttaaatgaagatgccccatgtttgttacctacgagtaaggtggtgaacacaggcactgttaatgaacttaataaaaatgaatttagtataactactagataccaatttaataatattatttatcttaatacttgaagaagaattaaagattacttgttagggcagaattagaaactgcaaagtatgaaatagtgatgttagcaggcataccacactatcatgacatattatggacaagtattttaaccatggtgcatggtccttcagaaactgaacagaggacagaggcccttattgattcttaatacttacttagaatagagaaaataccatactccaaacaggagtttgtcctaaaaggagacatttaaacctaaagtgttcaaggaagaaagaaagcttctaaagtggaatctctgtgccccagaagtccttgagccactcaatacttaaagttccatcatctgaaatgtaacaggtgaagaaaaatatcacctgatacagttattattgcagaatctgtattcttcctctctcccatgctactctcagaatcatctcttgtatgtcagtactgatgcaacgttgctaccaaaaaaattcttgctcccagattttaatttatgaggtaggctaactgaaattattggccatgactgatagaaagagagcagtatgattcactcctctgtagcgatttctatgattcatttggcgaccaaatctggaactgacagaatttagaatcagacctttttaatcccaattggaaatactacttaaagacatttggtatctggtatatacacaacaagaacacgtaaataaaagaaaaatcaaccaaccacaaaatctgattaggctgaacagataaaaaaactgtagagcagaggttaaggctacttgcaatgggataaaaaactatccttgtgttttaaaaaatgctacttatgaggatttttttcccttctgcaagatgcatggcctccaagaaattaatctgatatatgaatctatctcttaccccaaccctcaagcaaatcaaaattgcaaaattaattgaggagcaaatattttcatttttataataaaggctctttattttccaaagaaaatacagtttcttttaattgaaagtttccctaatgagacaaaatatgatgtataaaggacttattcatgttaatatgtttagggacgtatcttttatctacttcttaaagtgtgatccctggacaagcaacagcagcatcactaggagcttgttaaatgttggggccctatcccagacctatgttatcataaactctgagagatttggcccagcaatctatatcttaaccagccgtccagatgatttgtacacatgttaaagtttgagaatcacatatcccaatataaataagatagaaataagaattgaatagagttccctaagaagtgcttattgctacagagttaatactagaagtagcaattattcaaaagcaactatgttgtttatctgtcacagttatcaattatctaaatgctgttgtagccataagaattttatactcatgttggagaaacttaggaaggaaagggaattaaacatgaattactaacacaagatcttttaagggtgataatttgggagattctggggcccctattttaccaacaggagcatctccttggaaccagtaagagaaaatcagatagcgctttattctgatggatgtaatatagggatccacctttggccttaaaaccccatgaaagtgacttccaagtaagagtctggaattgcatcttgtatttctattttgcttaggcctgcagtgatcctctatagagccccagttctgagagccagagactttcaacaaccagctcacatgagtcaagcatttttatttcctttgtaatagacatctattatttgtgtctgcccagcaccttatttcccttctcttggtagtggcatacctacttctttgaggaaattgcttccttctttatttcaacctgtgattacatactttaaatgtaaatggattaaattttccaatcaaatgacaaattggcagcatagattaaaaaacagaatccaacaatacgctatctacaagaaactcactttagatccaaagacacagatagattaaaaataaaacgatgaaacaaatattccatgtaaagagttaaccaaaagagagcaggagtggttatgctaatataagacaaaataaactttaaatcaaaaaaactgcaagagacaaagaaagacatattacatattagtaacagtttcagtacatcaagaaatataaccattttaaacatttatgccaccaataggacaataaaaatatgaagcaaaaactgacagaactgagaagaaaaatagacagttctataataatagttggatactttaatactctgctttcattaatggatagaacaatcagacagaaaatcaagtaagaaaatgaaagacaacacaataaccaatttgatctaatagacaggtatggaacactacccaacaataacatcatatacattcttctcaatgcacatgggacatttttcaggatagacaaacatggtaagccagaatttaagtcacagtatgttatatacatacaatggaatattattcagccttaaaaaggaaggaaattctaacatattctacagcatggataaatcttgaggacattataccaagtgcacagaagacaaatattgtataattcctcttatattacatacttagagtagtcaaaatcatagggacagaaaattggcagggggttgccagacaatggggacaaggaggaatggggagttgttgtttaatgaatacagagttttggttttataaaataaaaagagttctggagatgggtaatgattatggttttacaacattatgaatgtttttattaacactaaactttatacttaaaaatggccaagatggtaaattttatgtatgtgaatattacaatttttttaatggggaaagaaacaaacctagcatctgtcaatttgaatgcattttgtggtgactggattttcaaatcacatagtaaaacacaacgcaaaaagcatgaacaatcacagaaaatagtgataaattagacttccttaaaattaataacttatgttcatcaaaataaattattaataaaaaactagcaggacacagactggaatcagatacttgttaatttgatttttttacatatttatcagaatacataaagaacaaatcaaaaacaaaaaaagacaattaaaggaaaatagctaaaaaatttgaatagtatttcatataacaggttcccagaaggccagtaagcatatgaaaaggcataggatattattattaattagagaaataaaatttaaaaccacagtgagatactaccacacatccaccagaatcattaaaatgaaaaacactgacaatatcacatatgggcacaaatgcagaggaactagggctctcatacatcactggtagaaatagaagttagtactatcactttgtaaaatcctttggcagcatttactaaagctgaattatgtctaccctacaaaccagccatgttaactctagctatgtcaactaaaaaatgaatgagtagatgtattcatcaaaaatcacaacagacattcataactgaaaaatgaaaataaagatctatcaagagtaaaatgaaatctccatagagtattacatcacagtaaaaatgaagctaatgattatttattataccataggcaagaatacacatgaatctcacaaacacaatattgagcaaaagaaagcaaatataaggtatcattccatttctatgaagaacaagaacaggcaaaatcaagttatggtgcttgaagtcaaaatggtggtaacttctaaatggaggaaaattaactgggaagggatgagaagagattttttaaatcttgctttatatcttggttcaagtggtagttatactagtgtacacatatgtaaaaattcattgggttgtatacttaagatcaatatactttcctatctgtgtattatacctcacttaaggaaaaaaaagaataaattttaaaaatgccacacagatgtcctaattccccatgtttttatgaggattcaaaagtgtaagagcccagaagagaatggaattgagaatcatttcaaatggaaagtctgtgatatgactgtgaagtccacatttcttcctagataagttgagcaacaaaagagtctaaaaaatattgaactattttagggttgtttggggacaagatgtgacaaactgatgagcagaaatgatttacatatgttaaaatcatctttcttgatccacaagatcacaccaaaatgcatttacatgctccttgaaaatcagggaaaataaaactcattcagtgccacaaaccctctctatgaaccatgtatactggtgaattctgtcttgagaagtattgtgttattaaattactatttaattttataaacatatccacctcttctaaaagcaccctcaaataattatattttctctgtattttcaaattaccttcgaaaaacccatacatgacacagcattaataaaatagcatatacagcagccttattatttctagctaatcattaaagtacaataaacttgacaaaaagcatgtctaggcaaatatacacactcacaaatattatccaatctctttccaaagctcctgcatgttgaccttatcaacctaattagatggttacccatttccaaagcaaagttaaaagcagtaaacatatccttatgaaaaacaggcaaaggttagcttcctggagaattgttgttacaatagatgtatgacttttgtcaatttgttttgagaagtgacaattgctactggaataatctgttttatgtttgtttcactgacataatctagtagctcttgttgaacataacattttagaactgaaagagaccttaggaataatgtagttcattttcctcattcaagaagtgagaaaactgagcaccagaaagttttcaatacttgctccacgtcagatacgtgggatacacctaagttaccttacaaatataatttagaatcagtctatgagctatgaagtctacagtaaataacacatatctcacaaagagaatttcagtttacaaattctgaggaagctaccatctccattgaaatattggcatggttcttgagttacgttttgaaatgcaaaccagtggttctaaacctcaaaactaatgggcatctaaactaaggccgggaccttagatatggcaagaaaaggatattttaaaaatgagttcactgctgcagagcacgcaaagtgtggtttgcagatccttggtctgtgtcactggtccatgatgaaataagatgcttgcagctaagtcagtaagtccactatttacttcagctgacctttctttcatagaaacatttctttgtgaaggaagcagcatacagatttatgttctggcacaagctcatcttgtcctagataacaaggcaaagtttgcatattggctacttgaatggactagtatagttcacatgtcagaattatcttgattaggaaagaggaagctggattacttatatcatatcatcagcaatcattgcttcaggcctatgtcctgggggtgtggagaaaaaactcccaggtctccaggcttgtgggtggcagtgggggcggtttgcttgcagcctgtccacaagatcaggtgctagttgttggttgggagtaatgcacactgcatgagtgcatgaaaaaggtaaaggactccaagatgataagaaagggacactaacctaacagcatttgctaatttgcccaggaagtatacaatttatcctagagcattgtgtcttgctacatatggtcttcatctcttctgtttcatctctaatggcaacctatcccatttcacctcactctataccactggtttcacattttgcttacagattgtaatcacctggggacttttagaaactactgatgcctgagttcttcacccaactatcctgattttattggtctagtaaggcctagatattggagatttttacattctccctcaggtgatcctattgtgcagccaagactgagaacaactgctctaagcttttatactaaatgacttacaattccatgaggttgacatggaatgactttgtttgccatgccatgaacattgcagaaaaaaccttccccatctttgccttcaattgatatttaaaatgctattcattctttaaggctcaattcagccatttttctcaattacaatggttaataaacacatgaacaaagtgttcactatgcttatcaaagcatagtgaaatacctacttcacttacctattaaaataagtcctttaatagactactggtaaatgtgtataataatttaaaccctgtagaaagcaatatgaaaatgtgaaacatattctttgatctagaacgttttggaaaccctagcccaaggaaataatcctcaacactaaagatcaccctttatgaacaactccactgcattatttaaataatgagaaacaacctaaaggtctatcagtaacagaacggttacataaattataaatagtcttacaatggaatataacaattgaaagtgatgcttaaaaatagtctttaataatttggaggactgtttatactgtaaggccaaccacacatacacacacacatttacacacacaaacacaatcaatttacaaaatctcaaataccaaacgttcttatttattttttaaatgcatgaaaaaagactgggaagtacatcaaaataaaataaatcaacaattattccagaagtggagattataaatataaaaataagatattattaaaattatctacaattaccatgtgtttacttatttgaaaaatatatgtaccttagtttctccttttaatattttcccttctgtattaatttctctcttatcaattatatggcttatttgtctttcatgttccttggattatgccttgtattttttatcagggtataatttacatataatcttcagaacataagtgtactgttgagttgattttgataaatttgatggaatatttccattaccccaaaagtttccttttacccactcccagtaaatctgcctactatccctgtgagaagcaatgacacataggatttctatcacctacagttctgcctgttctaggattgcatacaagtcgaataatatggtatatattatctttttcttctttcactcagaataatatttctgaaatttattaactttattgcattcattagtagttctcttttatcactgaggcatttccaatgtgtgaatatactacagtttgtttatccagactcctgtgaacatccgggctgttacctagtttggctattataaataaagctgctatgaacattcttgtacaaggttttgagggactttcattccatttccctgggataaatacctgtgtggtagccagactccaaaaacagcatgcaatagtccttgcttccttatctcaatgctcttgcatagccacacccttctccccgcacatacatacatcatacactcaataggactaatttatgaaattaataggatatttcacaaaactatggagtatgacttttgaagtgaggtcataaaagcttccaccttgctctctattgaatcattcactccagggcacgtcagcttccaggaggacactcacgcagcagtatatgggatccacatggcaaggaactgaggtctctggccaactgtcatcctcaatttgttagtcatatgagtaacctgtattggaagcagagcctccagccccagtcaagctttcaggggactggagacctggccaacatattacctgaaatctcatgaaagactctgagtccaaaccacctaaaccctcatctgaattactgattccccagaaattgaaatgatacgtgtttattcttgttataagccattaacattgtgctaatttgttatccagatgactaatacaatttaggaatagaatttatagatcatagggtagatgtacattcaactctttaagggatactgaacgttttccgagttgggtatgccatttccattaccagagttataattgctccatatctatctttgctaatacatggcatagttagtctttttcattttagccattctcataaatgtatagtggtatctcaatgaggtttaaatttatatctctctgatgactaataaaagtaaacatttcatatgtttattatgggccttgtggtttatatatttttaatattcctttcacaggactgttaataagcattaaccatggaacttggtactaattagggattaatgaatgtttgatgaagaaatgaacaggtttttgctgtcaaaacttacaaatagaggtaactgtgagctcttttaaagatatgaattgtaaattgcacaatataagctataactcaattactgggtggtagatatttataatgagatgttaaaagttttccttcttttcatttcctaagcaaaaatatgtaaatgcttcctctttcttatttactgggatccttcttgttaagtgtggttggcactgcactgaatgtcttgcaggacagggtgggaatagagtgacccttagtacatggaggcaacagtgagatactcaggactctgagttaaattaggaaaatcaacatataacaaatgaaatctgatctctgaggagatccttgaaagacgccatattacaaagtcccaaacaagctttgagtatacctaattaacagtataaacatacctatcgattaagtttgtcattacttgtggaatggtcacattagaaggaaatcaatggtaaccaggaagccagaatctgctataatttatttagcacgtatggaagagaacaatactgaatgagggcatgggacaccacaagaattctaagcaccaaagagctgttctctattgtaaggcagaagtggttcatcaggctcatgatgacccacaagacagagcttctcctattacctttgttcagaacttctgatgactgaatggcctgatgactaatttatcctcctagcatgagtacatactggagcagacacaatggttctgatcacaaccgaaaaaccattcccactgtaaaagaataaatggacacaggaagagatgagctaatcagataatggggattttctaattggcttaccggctgtacttcacatatttaattactatggtagatattgatctcacaagctgcaaactcaattgtgctaaaaaataactgtttcatttttctattactattcttaattctcaaactccattttttcctactggcaaataaccaacttagttcaagatgatagtcttcagacaaatcacagtttcttctgccatatgaggatattcccagtgaaatgaaggttcctcaccatcccccctttttcctgggtagtgtctaagacttagagagtaagtgggtggctagcaaggctgcagtgttgtacaactccaatgataccaatcatggcagtattgtttgcttctctgtcaacatttgtccatgctaatgcccactgctgatgtgcaaatgaatgagttttcctgttcaaacttaaaaaaagaggctcccctgaggtccttttaaggtagatattgcataattacaaaatataatctatagcattgttcccaagtgttcccttgggagtcagtttgtgagttcttctctgaccaaaagacttcttgaggttgaagttagacaactctgtctattgcagccctcttctaagagcacatgaagagctatgacctggttatctattgtggggaagtaaaccatccaaaacttaatggccacaacaataattatttttataatgttcatgccccacgggtcatatttttaagaactgggttgtgtgattctgcttcccttgggtcacttggtggtgtttcactgtggctgaactggtttggaaatccaagatggcttcattcacatgccagtcatcttggtgagatggatggaagacaggacttaactgagctcctccctctcccctacaggcagtctcagcacctccccaggtaggctctccagcagcatggtcagacttgttatgtgacagctggctttctttgtggggagcattctaagaaatctaagtgaaagctgcaaaacttcttgttatctagccttggaagtcacagatgctcatttatgctgcattctattcatcaattaagccaccaggctagcccacattcaaggggagaggaattagactctgtcccttcatgggaggtagaaagaattcgtggccatttttaatctgggggaggcggggagagggaaagagcaagccactctagggatcataagaaactcagtgaagttaacttaggctttcttggcccaagataccacatcatgctgtattatagcatcacccctattcaactggtgtcatactatcccaggatatgacaaaattccagcatctgggtattttcccaggtaccacctgggaagcaagggacaggtccttctgctcttggagcctcaaattcatttcagactattatcgctgcctcctcagggatctcggttttgcagtggggtgcagggcagagaacttttcagggaccaacatctgcatttacttcattttcatcttccctagttcctttgttctacccatgtcaagaggatcttcatcattagtcaacaggcagagcaaacagggcttgactgaatgaattttcttacttgcctcgtatttataccagggctttagaatttcaaactcaaagaccattaataaacgtttttttcctccattagattttagtctaataaaatctcccttctctgaggcacagagactgagatctagattgaagaggcaaacagaactacaggtaaaagggattgcatgaaaaaaaaaaatcacctcagtaattgtttcaaaatattttcctgtcacttttataaatggagcttctgtctcttacattagtcactattaggttcatttgttcaatcatctgagagactgtgagatgattaaatctgggatcactgataaaactgaattgctcaacctgcaaagctgagaacccaactcctcactttgctgaattctaacatgggaactctctggggttccactttataataatggtaactaaaagctaccttttgtttaatgggtacctaacactctactaagtgctgtacagtacatatattacctcatttaaatagaataaaaatcttatgagatagatcatattactatttatattttacagatagaaaaactgaggcacagaatgattaagcaacttggagaaggtcacatagtgacagaatcagaatttataccttggtaatctcattttagagttcatgctcctaacgactgggctactgacacattaatttttgttttgaaactgtaacaaaatattaaatcaataagtatatggatatgcaggttaaatatagctagaacaaaaagcataatagcaaacctagagaatataatggatatataaaggtacaatagtctaaatcctgtcaactttgttatttgaatataaacctcaaaaatattttaataaatcaaagtatttggatatttcttgaaaggaaagtaacaacctgtaaattgaccattaagtgcttcttattgacatgaaaagggttctttaaagtgactgtgctaagaaatctttctttatatccatgtcacatatggtgacagctgaggttaacttcctaattcccagttgtgaactataaaaacaaagtactagacttcaagagattagaactataatattacagtgacaatcaatcctaaatcacagctgctcaaataaatcaaacagggtgccccagagaaccaaagaaaaaacccagttggaatgaaccttcacaaaaataatgtaagccttaatgcatgtgccttgactccagatagttttataaatgtagaaaagatgccttgaaatgcagacatttaattttttatttgaaaaacagcgttattttttaagtgcatttttaacaacctctttcttttaatgctgcaaggaaggtcaactgtaggcaaaagctaaaagaaagcaggctggaatcagaagaaacaagagttaaggctaccctaaactggaatgtggtttcaagagtggtactggtttcttcttctgttctcatttttccccaaactctttgtcatcaatgccatctgacacttccagtcccaagccatccttctttactcaggtgtctttgttaatttctacacatcacacacacacacacacacacaccacctggatattaatattttaaatggtattaaactaacttcaccatcccaacccataatcttgattaattctaacctcgccatcccaaattctaaccttgaagatgagtctgtcatcttcagtctatattaaaataatttccaatcagtctttgaacaaaccacctattttttgacagagggaaaaatatacaaacagatagatatatagatagatacacatacacacatatgcacatagtgcataaacacataattatacctaacttcttgaatatttaaagtttccccaatcagtcacaaaaacaaaatatgtttctacaatcagaatttaaatgggacagtcagaatcacagtaagccattagttattaaataacataacataggtggatatgcctaatatatgattggcatttggtaattattagtaccctttccctttcagttgtgcataaaatataaagattagagaactgactgtatgtaaaaaggatagtgagaaatatttcatacgattcccagaatgtaagttccatgaggtcagggactttgttttgttcattgatagatccttagcacccggatgagtccctggctacagcagcattccagaagtatatattgaacaaatgattgtgtgataggaaagagggaaataagggtagaagggagggaagggaggaggagaggaagggtagaagggagggaagggaggaggagaggaaaggaggaagggggagagagggagggagggaggaaagggaaggagggagggagggagggaggaaggaacgaaggaaagaaggaaggaagggttttacttttgtaaaaacctcctaattagtctttgcacattcactcttggcctcttaaattggttctccacacaaaggatagatttatttttacaaattgtcagtcttgttatttgccatgatcttcagctgatctcttaaatatttcagtgctattctattgttcttacaaattcttatcatagccagtaagtccctatgtgctctggctcccattttttcattgcagtcgcacgtcacatcactttttccctaacttcctgcactataatcacattgtctacattcatttcctcaaacacccttctcccctcaatgtcatgctctctcgcacctcaaggtcgcctgctggaatgcatctctcccattgcccatcactttactcttctactctactctccttgccctttaaataattcaaacacacatctctttctcagggaatattatcctgacttccctttcctaatattcatgtactctcgtggcaccctatactttccctctaccatttataatatagtttataactataaacacacacatgaacacatatatttatttagttatttgattatatctgcctctcctcataaactgtcacctctgcaaatcaaggtcatgtctgcttgatatacagaagatatttttcagagattagcaaaggctatgcaaagccctactaataggaactaggtctaactaaatccatctatccacgacacaacagagtatatgggtaactagtatttctcataatgaacagagaaatatcacatgccatttgaatgaatcaataaatgatcatgcaggagatgattacttgggtgccccccaatgagctgtgcttcccagcattcacatccttgtatcctcctctctccttgaatctgggttggcactgtgacttcctttaaccaataaatagaatgctgcaaaagcaagctgtgccaattctgggtttaaggattaagaaggcctggaaatttttatttttgtatttttgggtaccctgagctgctgtgtaagaagctaaactaccaaaaaaaacaaaaaacaaaaaacaaaaaaacaaaaagccacatggaatgactatgtgaaaagagagaggcccagaaactatacagagagcgagaagtcatcccagcatcccaactgagcctagctccagctcactgcaaacctgcctgctaaatacagccgtgagtgactgccagccacaaaactacccagctgggcccatgtcagattaaagaatcatgacaaatagtgagaatggctatggttttaagccattaaattttagggcatttgttatgcagcaatatataaggtaacggctgggaactaagaatagttagggatcaatttaaaacaatttcaatataagtctgctgatacatctagattttgaaatatcaatattctcttctttctgcacgtaataagaagccaagcattggaaagctgaaaattttgagacactgtaagactataatttaatagtagaagtatatgtggctcaccattcataaaaaataaacatcctggcacttcaatatattcacttcagaactttggtcctcttttaagagcaatctttagccagtattatgttttcagcttatgatgtattatttgcattttaaaacgacaaccacaagatcaagtcattcctctcacaaggttaacatatctatttttcttataaagcattgtttttgtcagtcacaatgttttatcctgagattagcctaagatgcttgatcacaatgttcttaaagattgctaaagttttttacgctaaagaataaaagaaaaatatttaaatcttgaactagttttcagaatatttcagagaagctaggaaaatataagtatcatcatccttaatttgtaaatggtctcctgagttctgaaggatggtattatttgccaaatgccaatggaaaactccatgctatcaagacaggtctccttcaacagttgtcataacaactgatatgttcatgtcctagattctggcccacttactatcatcaaaagtaaattcctgtacaatcagtttctttgaacaatcacttgggtttagcttttagaactgcagtttagaagtagtagatcaattggcaagaatcagcacttgattttgaatacttccacagctgcaagcatagcagttattcagcaaggtttcattagagaaatctggaattcagcccaatcagtttggataaaaaatagtcttacataactcttcttcattctaatggcagtttagcctcctcacagaagaaactatttctgctgaaggggcattttcactcaatcacattaattgtttggatagtgctgaccacataacacccaagctcttcaaaagaaaggacacatcaaaatagggcaacaagcatctgggaggctgtgctggattacaactgggattttatgcttattgttgattttgttttcaattagcaataaattatgaaaggcttaaattcaattttaaaaaacaatgattttaaagtgagaaactaaaatgtgaatctagaaactctttaaaaacatcttgagggctttattgattttcaaatgagtttttaattattttgaaatagtggagtttttgaagaaatcattcaataaaattactagactagaggttctgaagaaaaaacaagtccccattcttgaacactgctacctagacaaaagtgggcaaatgtgatgtcctttgcaaagtggaaacttattctagttggatttttcattccttgcaaaccacccatatcccgagtgggtgaattattctagattctctctctgccactagaagagggactttcaccaccaatgtaattcattcttgttttggcaaaaacaactgtggactactgattttaactgaggttgacataacacttttaggaaaggagaagctgggccttctttcaatattacaaaagtattccatgatctttgacacaatgatgtttggctaaagagaactttgagtcaatgatagaggaaaagtgctagactaaatgaatatgatgacataagtaaaggtctcaaccactattttgtttacacaatcttcattgaggagttttctaaaatcatttggcagcctaaagtgaagtggagcttaggatgcaatggaaatttaaacatcatccatcagaaataggtaggctttggcataaactctagaagatgtcagttgaaacccttagttctggcaggaacaggggttaaggtttgctttcttcgctgatctctcattattcttactgttcacatggagaatgcagtgatgacctggggaatgttaaaggtagaagtttgttacagaggaaagaaaatgtgtgttcacgcataaaagaaaaagaaatataattgggaatacttcataaagtagaaagaaattaaaactatgtatttttgttgggtggggagaacagattcattcttccattttctgatagtgacagcatgatcttccttggtgaatccacacttctcatctctcatctcaggcagtcttggtgcacgacactgtcctagctatagtgattagttcaattggggtcatatgacctgcatcagtcttgtgagatgcaatcctgagacttttatttaaaacaaatagagaagctattgttctattgaggttgctgaaacaataagatataaactttgtggcaaattatttatgttggtgacagggttgtaggagtaaagtctacttgaatgaagccaataaagagaaaaactgagctgtgcaatggaaaaaaaaatgatcttaatgatatttttctagcctgggatccagatctaaccctagaattttcaatgataggatccatttaagttggattatcatcacttgcaaccagtatgtccaataaaaatccatgccttgaacaatacacgggaacatctcaaagagacaaagtaactgaaaattctatgaaaaaaatacacattcaaagggctgcagtaaattattcaaataagacagttgtaatcctatataaccattccctgctatgtaactaaacatgacctctcaggacaatgacctcaaattcttcgtcttgagctcctaagatgttgtcacctctgtccttgacactattagggctggtataaaatcaagatcacagtttagctgtggagaggagctattaatatttgaaacagttgcataatagttgtatgccaaaaatgagttaaacagacaataaatgttggagacatcccgctgtgagctgacatagtatagagggagggggaccgccttagtcaattttttaataaattccctctaatcattctcattagccttgttcaaggctttttattttcacagataagatctacaaccaactgtttgtaactttgtaatctataaaaaagaaccactatcacatgttagtgcttcacacacaaagtggctcagtaggatatgtaaatttaaattgcttcaattaaagcagttctaagcaattgcaatataaagtttagtaacattaagacacaatgaaatactgtgggaaatgctttaaaacagcagcagatattaagcaatactgtggttatcattatggttctgttctcttaagacaataatttagatgcttacaggggtgcaagtaggttatactaagcctttttgagtcaaggaataaacctacttcttgcaactttaaatgctttaattctctggtcagttcttcttggattatgatcagtaataattctcctggcactgcagcatcagtctctcacatgttggtaaatctagacttgggaagcaaaatcaatggtatgtttttgagacatcaagaaagatgtgacagcgcctcagatcctatgcactgaactactgtcccacactgcaatgaaaaaggctatagatgtttctcaataacttgtgtactaaattgagtaaagcaggttatttcacaaggatccaggaagcataattattactaagcattttcatagcagtcagtgtggttctaactgttcacaaaacataaagaagccttacatccaggctatggaatacaaaaggtaaactgaaacgtgctctatggagctaaaatattttcaagtttctcttaaagatattaaaagtgccaacacagagggtgagacagaccaaataaaattatttaaatagtctgcagaaactaggaagaaaaataaaaatgtaatagaaattggaaataaaaatagtgaacacatgcaaacatagcagcagccatactactaatagaaaacattacagaaaaattggggaggggtattaaataatcccaattatcccttaatactttgaggattggattctaaaacttagctgcaagattagaatccatataaatacctcaaagtgaaatctcatgggaataaggttagcagaaacatgcaaactcaagcatatcagatataactatacagactttaggataccagtagaaagaggtcgttgtcacacacacacacacatacacacacacacacacacactgagcaagtcacacacttatgatccattcttgtcattcattccaatgcacattcattaacatctcctatatgataagtatttttctaggtagctgaatatctgtaatactcttctaatgttaaaacttgaatggttattaattttttgagccatctggttccaaaggccactgaacaaagacatagttatagaactgtggttctctaatttaagatttcatggaaaagtacaatttcaaaaaatatttttaaaattactttgagatcaatatagaagtgccaactgttcctttagcaaattaaagatattacaaaataactgccatctactgtaactaacatttcctttttttttttacaaagggaaattttaacataatagaataggaagatcaaactcttgaaataaaaggtaattttccaagaaacaaatattgtagtcttcctatatttatttatttctcaaacacttatatagtgcttatgttgtgccacatactgttttaaatgcttttcaaatattagctcatttaatgttaaagatgacaccatgataaaggcactattattatgcttacaggtgaggaaactgagacacagagaaattaagaaagctgtaagttcccacaactgttatggtgaggttgaccttaggcactctgacccaagttgatgatcttaaccactcccctgcataacttctacataccatgctatctcaacatacatattcacattacttttaaaaaacagttttcttgagatataattcacataccatttgaagtgtacaattcagtcgtttctacaatattcaaagttatgcaaccatcaacacaatcaaatcaataacatttaaaacaacaggtccattaacaatcactccctcttgtcccaaacctcccagctgtcggaagacactaatcaactttcatagatttgtctattctggacacttcatataaattgagtcatacaagaagtagtcttttgtgacttgcttcctttactaagcataatattttcaaggttcatccatgttgtagcatatatcaatactttatttctttttatttctcaataatacctcaccgtatggatatatcacattttgattgtcacctcacttgttgataggcatttgggttgtttctattttctgctattataaataatgctactatgatcatttgggtaaaagttttcttgtagatatatggtatttctcttggatatatactagggagtacaaaaactgctgggtcatatgcagctctagaattaatgttttcagaaactgccaaatagctttccaaagagactgcgctattttatattaccaccaacaatgaatgaaaattccaatttctctctttctggaaggaacttgtgaaggatttgtggtcattcttatttaaatttttgttagaatgcacgagtaaagccatttgggcctgggactttctttgtgggaaattttaaaattagtaattcaatctgtttacttgttgtaggtctatttggaatttctacttcttattgggtcatttttggtagtttctatctttccagaaatttgtacatttcatgtaagttatcaaatttgttggcatatgatggatgaagtttgtaatcctttattattttattgatgccaaaattactgatagaaaaaaattctgctactagccagaagaagtaaacaaagaagacgaaattgacgtcctgttgctaatttcttgctctagcccttctcaaaatgccttctgtcatgatgaaaccagaaaatataaactgtgttctagataacaggcttaaagtcatagccataaagaaaatcagaaactcttttctaattaaaatataacagctaaattatcaattaaaatgtgtatgataaatattttctcataatcattttacaatgtgtttatttctaagaagactgtaagtgctccttagagggttaaactcctatttggaattctgctgactaaacctctaggactcttatacattgtattttcttatttatatttcagacttatttataaattgtaaatcagatcccaagaagcatcatatagtgaccccattatgaaatccagaagaagtgtgtgaggtatttataagaaactacaatgatatcttctatagtataatgattattacaggtataataaaacctcccgaagtagtttgaaaaagagggcttgctcccaaccactatgaacctgtagttaattaggcagcctctacctggaaatataaacagtgtctcatctttaggctgtaaaccagaatgacagcctagatcccgctccacatctcttactctaaactcaacaatgagaagcatcacatactatgtgagcatgcaaatgtcaaaagactccaggggtctcctagttcagccctctcagttcacaaaaaaaaaataaaactgaagcccagagaggccagtaaccttatcaatatcatacagctattagtctccaatccactgtgatcaacatctcactatagcattacccactttcttaatattttcagagtttgagggtgcaaatgcctccttattacgttattgattttaaaatatttcaatataacagaaaaatataaaaaacaacacatgactatgcccttagccttattagactttaatagtttattgtatttcctcttttcattaaggaatgaaacaattcatccccacacaaatacagccaatttatttttaacatcagtggaaaagcagttctgtagagaaaggatagtcttttcagcaagtggtgctggagcaatgcatacagacattcacagacaaattaaatagataaaataaatctcaacttgcacctcactatttatacaaaaattactcgaaatgggtggtagaattaaatataaaactataaaacttctagaagacaggagaaaaatgttaggacttagtgcttggtgatgagttcttatacagaatgacaacaaaagcataatttacttttaaaaatcaatgaattggacttcatcaaaattaaaaacttttgttttgtgaatggcccctgctaagggattgaaaagacaagctatagactgaaagaaaatatttgtaaaacaaatattatagaggacttatatctacaacaaaaaaaatttaaaccctcaaaactcaatactaataaaacaaacaatccaatttgaaaatggcaaaaagacatagacattttactgaagaagacatatggatggcaaataagcacatgaaaagatgttcaacatatctacctatgataggcagaacaatggctccctaaaaatgtctacacccaatcctcagaaccagttattctggcatggcaaagggggctgtggttgcagatggaattaagattgccaattagctgaccttaaaatacagccattatttcagattatttggttggggctactttaatcacaggggttctgaaaagtggaagacccaggcagaagaggtaagaatgatatgatatgaggactgaacccacaaatgctggatttgaagacagaggaaggggagccatgagccgaggaatatgagtagagcctaggagttagacaagatgaggaaacaaattctcccttacaacctgcagaaaggaataccaacactttgatttcagtctggtgaaaactgtgttagacttctgacctacagaactgtaaaatcgtaagtttatgttgttttaagccactaagtttacagttatttgttacagcatcaatagaaaactagtacattatccatcagagaaatgcaaattaagactatgataagacatcactacacacctctttgaactgctaaaataaaatacagtgacaataccaaatgcttacaaagatggagagaactggatctctcacatgtcattaagggaacaacaacatatggctgtaccataaaatggtacagcaactctggaaaatagtttgaaaactctggaaaatagctttaattttctttaaaaactaaatatgcatttaccatatgaccccataattcactctgaagcatttatcccagagaaaaagaattatgatcgcagcaaaacttatatgcagttgtttgtagtagccaaaaattgaaaagactaaaatgtcccacaataggtgaatagtttaaaaactgttacatccatatcatggaatactactcagcaataaaaaggaatggattacagattcatacaacagcttggaggatctcaaggatcaaagacattatgctgtgtagaaaaagagccaatttcaaaaagtcacactatatggtttaatttatataacagtctcaaaaagacaatattttatagagatgaagaacatattaggtggttaccagggattagatatggtggcaaaggagtgtggctgtgactataaaagcatagcacaagggagatcattgtagtgattggggctgttctgaatcttgattgaagtggtgattacacaaatctacacatgtaacaaaatgacatagagctacacaaacacatgagatcaatgtcaaattcatgactataataactatagtaatgcaaggcataatcattgggggaaactgggtgaatggtacacaggacatatctgtacaatttttgcaacttcctatgaatctttaattattatcaaataaaatgttggggaaaaaaacaaacaattccgttagatttgaaagcccagtgtatccttccctctctgagcccatttacctccttccctacctcccttcacagaaaaatcctacaattggtgtttaggatttccaccctcttttaattattttactgcctatggatgtattctttaaaaacataaaatattgttttgaatgtcctaaaacttcctagaaatggcatcaaataatattaatccctctgcaagttgtttttgtttttgcttaaatttatgttgctattatgttgtttattaaatttattaacattacccatgttaatgtatctcatggaatttatacatttcatctactatgctgtaagtccattgcacaaatatcccagtttttatttgtactttcttctgttgatagaaatacagaattttatttttgagtatcatgctatttcaaaataatgctagaataaacatccttgtgcatgtcccctggcaaacacatccaatcatgtttctagatatatgcctagaagtggaattcctccttcaagatatgcaaatgtttaactttactaagtaaagtcaaactgacttttccaattggttttaccaatttattcttatttggcactttcacactttaattcttaaaactggttggtatgaaataaaattttcctttttttaatttgcatttacttgattactagtgagctaaagcaaatatttgtgtgtttatcagccatttttttctgtcgattgtttgttcatatctttcacctatttttccattggattgaatttttaaatatttatttgaaagattccttcatacaaaatgcatattaatttttgttggttgtatatactataaatatctcctattctgaagttttttaaaaatgttgttggtgttatttgctattcaaaaatgtttgttttaatatattcaacctattattatttttctttatagtttgtcttttaacccacttatgcctgaggttgcaatttttttgaatttttgcaatcaggccttggcgatgatcttgagcagtaggataataaataactctcacatgcttagcattccaataatggaacactaggcgtaaatgggttttagtcttaagaaatccttccctgcccactggccacaaagatatttcatacattttcttctaaaaaacataaaatctttactattcttttcacctttacacctacattccacatgggatttaattattatatgttgtaagaaagggtacttattattttatttccccatgtgaataattatatctcctagcatcatttattgtatccttaccacactgatttgtaatacatccttagggacacatgagtctatttctaaacctagtatatttatttattgctgctccaatatcccaatgtcttaatcactatacttttacagtagctgttgacatgtggtagggctaatcttcccgacttcttcaaaattgtgttggttatgactgacgcttagctctttgtatacattttggaatcagattgatcagattgtcaagttcctgaaaacaaccaacaaaaccactcttgtgtgagctcttattagaatttataaatgaatacagaaagaattgaaatctttctgatactgagtcattctgctttaagtatagtatatctttctatttatcatcttctttgtgtcttaccttaaaattttgtaattttatttgtaaagatttctaaaaatcctttgttagatttattactacatgtttctaatttttgctgtattcatggtatctgcttttaaactgaattttctaattgtcttttgctgggttacacaaaggtagtttacagaattttctaattgtcttttgctgggttacacaaaggtggtttactttatatctagcaattttcctgaacttttgtattattttctaatagtttttcaatgaagtctctttactaataacaattaggtttctctcttttctatctaccttttatttatttcttttacctacaatgctggctagaacaaccaattaaacataagcagaacccgaagtcattcttctcttgttccagatgtacagggattatttccaatatactagtagctgtaatgtttccagtggtttccttactcaaacatgccatgttaacctatttattagtcttttcagggctttcagttttgttttatatattattaatacacacatttttcttttattatactttatatttgctttgcctactctctaagttcttgaattggatgctgatcttattattaataatatttactcctttgggagcaagatggtggaatagaaggccccactgattgtccccccaccccacaggaacaccaaatgtaacaactatctaggcaaaaatcacaccttcagaagaaccaaaaatcaggtaccagctcagctatggtgggttagggcaacaagcagactcttggggtccccagttccaaggcttgactcttgaatggcatttctggacctgccctgagccagaagggatgagtctcagacttggctgcattcaccacaagctgactgaagagtccttgggccttaagtgaacagtaccttaagtacggccaggtatctagggccttgccagatagtggttacagcaggccttggacaagacccagtgctatgctggcttcaagtctgacccaacgcagtctcagtgcaacaggcacgcttctgtcaccccacccctagccctaggtggttagctcaacatagagagagattctgtgtttgggagaaagtaacggaagagaacaataatctctccctggtaatccagatgattcttctggatcttatgcaagaataccaaggcagtacctctatgattctgcaagaaccacagcattactaggtttgtggtacccccgatgcagatatggcttagatcataatacccaagtacttttgaatacctggaaagtcttcccaagaagaatgggtatgaagaatcccagactgtgaagatgacaatacctaactcttcaatgtccagacactgacaaacatcaacgagcattaagaccatccagcaaaacatgacctcaccaaacaatctaattaaggcatgagaaaccaaacctgggaaacagatatatgtgacctttcagacagagaattcaaaataactgttttgagtcaacccaaagaaattcaagataatacaaagaaggaatttagaataatatcagataaatttcacaaaaagattgaaataattaacaagaatcaaatagaaattctggagttgaaaaatgcaattgatatactgaagaatacatcagagtctctctctctctctctcttttttttttttttttttttcagatgcagtcttactctgtcacccaggctggagggtagtggtgtgatctcagctcactgccacctctgcctccagggttcaagcaattctcctgcctcagcctcccaagtagctgggattacaggcacacgccaccacacttggctaatttttgtatttttagtagagacgtggtttcaccatgttggccaggctggtctcaaactcctgaactcaggtgatctgtccgccttggcctcccaaagtgctgtgcccagctggagtctcttaatagcagaattgatccagcagaagaaaaaattagtgagctagaagacaggctatttgcaaatacacaggcagagaagacaaaataaaaaagaataaagcatgcctacaagatctagaaaatagcctcaaaagggcagatcttagagttattggccatgaagaggaggtagaaagtttattcaaagggatcataacaaagaacttcccaaacctagaaaagagtatcaatatccaagtataagaaaattatagaacaccaagcagatttaacccgaagaagactaatgcaggtgtttaataatcaaactcccaaaagctatggagaaagaaataatcctaaaagcagcaagagaaaagaaacacataacacaatggagctccaatatgtctgtcagcagacttttcagtgaaaccttaaagaccaggagagagtgacatgacacatttacagggcataaagaaaaaacttttaccctagaatagtatatctggtgctaatatccttcaaacatacattgcctataataaacacacttcacctataaacacacacagactgaaactaaaagggtggaaaaagatattccatgccaatggaaacaaaaagagcaggagtagctatacttagacaaaatagacttcaacacaaaaactgtaagaaaagaaaaagaaggtcattatataatgataaaaggttcaattcaggaagagggtataacaattataaataggtgtaaccaatattggagcacccagatataaaaagcaaatattattagagataaagaaacagacctcaggaaaataacagctggagagttcaacagcccactttcgtcataggacagatctcccatatagaaaatcaacaaagaaacatcagacttaatatgcactatagaccaaatgatcccgatagatatttacaggacatttcatccaatggctgcagaatacacagaatacacattcttttcctcagcacatggatcattctcaaggacagaccacatgttaggtcacaaaacaagttttaaaacattcaaaaaatttgaaataatatcaactatctcctccaaccacaatggaagaaaactagaaattaaaacaagaggaattttggaaactaaacagacacatagaaattaaacaatatgctcctgaatgaccaacgggtcatgaagaaattaagagggaaattataaaatttcttgaaacaaatgataatggaaacacaacataccaaaacctatgggatacagcaaaagcagtactaaaagggaaacttatagttttaagtgcccacatcaaaaaagaattaaaacttcaaataaaaaaacccaatagtgtgtcttaaagaactaggaaaggaaagcaagagcaaaccaaacccaaaactagtagaagaaaaaataataaagttcagagcagaaataaatgaaattgaaacaaggaaaatacaaaagatccattaaaaagtttgcttcttgaaaagacaaaatagattaacctttagccagattaagaaaaaagagagaagacacaaataaataaaatagagatgaaaagggagacattacaactgagactgtagaaattcaaaggatcgttagtggctactatgagcaactaaatcccagtaaattaaaaaatctggaataaatgaacaaattcctagacacatacaacctacaatggctgaaccaggaacaaatccaaaccctgaacagaccaataataagcaacaagatcaaaactataataaagaaatctcgcagtaaagaaaggctgtgtacctgatggcttcactgctgaattctaccaggcatttaaagaagaactaataacaatgttactattttgaaaaatagaggaggaaatacttccaaactcattctacgatgccagtattaccctgataccaaaaccagacaaagacacatcaagaaaagaaaactgcaggccaatatcactgatgaatattgatacaaaaatcctcaacaaaatactaacaaaccaaattcaacaacacattaaaaatataattcctcatgaccaagtggggtttatcccagggaagcaaggatagttcaacatgtgcaactcaatcaatgtgatagatcatatcaacagaatgaagaacaaaaaccatttcaattgatgctgaaaaagcatttgataaaatttcacatccctttatggtaaaaatcctcaaaaacctatgtatagaaggaacatacctcaacacaataaagccatatacaaaagacatatacctagtatcacactaaaggaagaaacactgaaagccttttctctaagatcaggaacatgataaggaagcccatttttaccactgttactcagcatggtactgaaagtcctagctagatcagtaagacaagagaaaaaaacacagggtatccgaattagaaaggaaggagtcaaattacccttgtttgcagatgatatgatctcatatttggaaaaacctaaagactctctcaaaaaaatattagaactggtaagcaaattcagtaaatttacaggatacaaaatcaatatagaaaaattagtagcatttctaaatgccaagagtgaacaatctgaaaaagaaatcaagaaagtagtaccatttatgatagctacaaattaaataaaatacctagaaattaaccaaaaaagtgaaagatttctacaatgaaaactataaaacactggtgcaagaaattgaagaggacacaaaaagatggaacgatatcccatgttcatggactggaagaatgaatattgttaaaatgtccatactatccaaagcaatctacagattcaatgcactccctatcaaaatactgatgacattctttacagaaatagaaaaaaaatcctaaaatttatatggaatcacaaaatgcccagaatagccaaatctatcctaatcaaaaggaacaaaactggaggaatcacattacctgacttccaaattatactatagagctatagtaacaaaaacagcatggtattggcataaaggcagacacatagaccagtggaatagaatacagaacctagaaataaatccgtacatctacagggaactcattttcaacaacaatgccaagaacatacattagggaaaggatgatttcttctataaatggtgctggaaaaactggatatccatatgcaaaagagtgaaacccaatccctatctctcaccatatacaaaaccaaaatggatgaaagacttaaatctaagacctcaaactatgaaactactgaaagaaaacattggggaaactctccaggacactggactgggcaaaaatttcttgagtaatgctccacaagcacaggcaaccaaaacagaagtggacaaatgagatcacatcaagttaaaaagcttctgcacagtaaaggaaacagtcaacaaagcaaagagaaaacccacagaatgggagaaaatatttgcaaactatccatctgataagggattaataaccagaacatataaggagcacaaacaacactattaaatctaataatctaatttaaaaatgggtgaaagagttgagtaaaaaattctcaaaagaagacatacaaatggaaaacagatatatgaaaaggtgctcaacatcattgagaaatgcatatcaaaactacaatgagatatcatctcactctcattaaaatggcttttatccaaaagacaggcaacaacaaatgctggcgaggatgtgaagaaaatggaacccttgtatgctgttggtgggaatgtaaattagtacaaccactgtggagaacagtttggaggttcctcaaaaaattaaaaatagcactaccatatgacccagcaatcccactcctaggtatatacccaaaagaaaggaaatcagtatatcaaagagatatctacactcccgtgtttattgtagcactagtcacaatagccaggaattggtagcaatccattagcagattaatggataaagaaaacgggttacatatacaaaatggagtattattaaaccattaaaaagaatgagattctgttatttacaacagtgtggatggaactagaggtcattgtgttaagttaaataagccagacacagaaagacaaactttgcatgttttcacttatttgtgggagctaaaaattaaaacaattgaactcatggagatagatggtaaagggatggttaccataggcttgtaagggtagtggaggagggagggaagtggggatggttaatgagtacaaaaaaaatagaaagaatgaataagacctaaggtttgctagcccaacagggtgactatagtcaaaaataattcaattgtacagttttaaataactaaaagagtataattggattgtttgtaacacaaaaaataaatgcttgaggtgacagacaccccatttacaccccatgtgattatgatacattgcatgcctgtaccccatgcctgtacaaaatatctcatgtaccccataaatatatacatctactatgtagccaaaaaaattaaaagttaattttttttaatttgtaccttttttcattttcttatataggcatttaaagctataactttctaactataactttcattgcttctcatacaatatttaatggatgaatttaattaatattaacattcagttttaaatattttctaattttcattatttttttgcttgactcatgagttgtttagacgtgtgttgatttaatttcaaatccatgtgggattctttttgttgtcttttaatttaaattattaatttaattgcattatagtcagatactgcctcttcccaaatcttcctgtgctctccttctagaaggcctatgaaacatatattgaatcttatgctctccaacatgtctcttaacttctttttcatatcttctatcattttcttttcagtgccttctggttgatttcttcaaattatattacagtctactaattttctctccagctatatctaatttgtttaacctatgataaattattaatttcaattactttagttttcacctttataaagtgtgttctttttttaaccttattttttcttatatttataattcatttatgtctctatcattttcaatattcatttttcatagtctatgtgatagttccatcacttttaggtcttattctaatcctgctctttgtgtttgctaactctcacttgtgggggattttgttcttatgttttatagtttgaggttgtgagttaatctttagaagatatttatgtttaggaatcttgtgaaacttggttgaatggtatctttctcctaagaagtttgtaacagattctgccaggtgctttagaagtatcagtaatctgggctctctgtagttaatttttcaagttgtgatttttccatactacacaagtagtacaaattcaattcccaaacctaaatgaggtacaaatccatagagatgtgtttttgaaggagacattctttttctaagacacagcttccttgtctcttctgttctgatgattttttttcagtcctttccattccaaggtcacaactttgtactgaagatctctgttccaacccacagaacctcaattttccatttcatatctcaagccctttgttagtgagactaataatactgtcccaaaggcagccacagtatcaattcaagtgtttatccctggagttttcaattcaacctttacttctgacccatagtaatgattttatttcctttcaagattagacatgcagtatttctaagcatccgtagcagggatgatagtaagattattagccatgtttctagaactgttagtaaaaagtaacttattttctctagtaaaaatcaacttacagcacaattggcaagctgaatccttgtaatttaccaattatgaaactttttcagttcacaattatattatccaaagcttgtttgatcccacttggtcccagtttcagaaaaccacatggaaaaaaatatataataattataggtgcatacatagcccctagctacaactagaaacattacactgaactttacatggatccaaataaatcctttaattttctggattccctctgaagcccatcccatcacctttttctagagtcctctagtgcttcctctctctcctctccctctctctcacacacacacacaagacagagacagagaaagggagagagatcatttttcatataagtgttcactgcttactgtcaacaagttatatggcttttcttcttcctttccattaattcaatacaacttgtctaagttcctgctgtgctctagacattggagatgttgccaaaaacaaaacaaaacctttgacccacagggtttcaatcatagtatagaagaaatacaaataataaacaaattaataaatatattttagtttgaaccaaatgaaatggccaatattcagctgttcttgatccacccaaaagcaatttcatatggttcaacttgatagaatatgacaggtggtgctacgtgctgtgaagaagatagggtaagtggagagaaagtcatgggtgcatgtgagtgtgctattttagatagcatggccacagaacctctctttttaagtgctatttgaacagatgataatggagtgagaaagtgtgtaatacggatatctgggggaagaatattctaatcagaaatgaaggtggaaaggccctgaggagggatggcatataaaagagcagcaaggaaacagagggacctgaagggagcgagtgacagtaagagtggtgcaagataaggacagagaaggtcagggccaggcccaagaatgccatgtcagccatggcaagacatttgatctcactcctcatgagttgggaagctgttggcaggtttgggcagaggagaggcaaaatcagacttgtattttcaaggatgtggaggccagcctccaaggagcaagatgaacagaaggggcttaggtaggagatgactgctttcatgcaagagtgagaccatggtaacagactcaggtggtagcaaaggaaataggacagactggaccttcacaattctttcatgacctctcttatctttctttttaaaaagtatatttgtcttatcaatttcttattcccaaacaagtatatttccaagcttccacttcttgcccttggttggtattggtgtcaaaatcattttgcctgcctgcttcgatagcctgctttccaacaggaaacttctaaatctctttacattcagtgctccaaaaatatacatttgcacttcccatagcctgacacatctgcatcatcccttttgttcctaatcactctcagaacaacagcagcatacctgattgaggagcagctggcattcactgcgcaaagagcaccatcaaaaattgagcatgtggctccaagagccaccactgtttccttctgtttcttgccaaagactgtaacttgtgggtaggctgggcctgagtgatagcaggaaatggcccactgccatgcaaagtggctcctctgaaaaaacttttaaccatatccctgcagctggaccccttcctctgaagtttctagatattgcaactccccaaagaggaagttgtctaagggaggtacaatgctttagggagaaactgaccacagcttaatggcttgtgaatgcaaccactgcaacttctgggcccatttccctctcatgcccacacagggctgggtgtgttctattaaacatttaggtaaaaggaataagtaactagctcagcaatgtcagcatcatgtcaccatggcatgacagaaactcagttttctgactcttagtgaaatggatcattcaagagtaaagcattaaaatgtttataaaatacagttggtccaagaggacaagttgtgtcaaaatcattttccaagacacctcatgttttaaaaaatcctaacatgtagcctgcatgcaatatgcaaacaggctgctaaggagaggacatgacattaaaatgtcagtagaattactgctcagctgtaagaactcacacactttagatttaacagcagtgagtttacattgggtcacaagaaataggatttaaatgaatattccaaacctattttctgaaaatgcattttgcaaagatacaggtaggcatacctacttctgaaaaaaaattcatttgcaatagaaaatgggatgagaaaacagaaataaaatgtattcatcacccttgtcactcctctattttaaataaagcagaaaccacacataacattccaggatattaagctaggtatgaaatgatgttcagactactaaggctaaagattacagccataattcaatctgatattaaatgcatttatgatgccatataatgtgggagacatttaaaatgactaccaaaatttctactaatatgaccttttcttgaattttattgttaaaaatccttttctgccaaaatgtcaaggtttctcacagtgcttctacatacactgtaaccccagtaatagaaaatgtatattttctgtagacactggggctatcatcagacaaatttattctgctgaaactggagtcaacattaaaagagttttttgcagcataggtattttttcacttataagttattactcatttttcctaatactgtgcagataatataacaacaatattgaaggttttttttaatatttgaaaattcattgcacataaaagcatgctatgctattgttcctgttttaggtccccagtccctgatcaaagatgatatacatctctagaggcagctaggaggtgtctctaagctggtaatagtcggggttggatttgtctcaaagcagcaaaaacttgtaaagatggttctgcatccctaagccttctctatctgataactttgattattttcaagtataatcatgtgccatataatgacatttaggtcaacaatggaccacatactacagtggtcccattagattataacgaagctgaaaaattcctatagcctagttattaatataccataggcatagtaatgtcataatggaaagcagtacttatatgtttgtagcaatgttggcataaaaaacctactgtgctgtcattcatataaattagagcacacacaattatgtgtactacataatacatgataacaataacaaataatggttactaatttatgtgtttactatactttttatcattactttagagtgtggtccttctacttattaaaaaaatagttaactgtaaaacagcctcaggtaggcatatcaagaggtattccataagaaggcatggtcatcagagacgatggcagctccttgcatgttattgcccctgaaaatcttcagtaagacagggtatgaaggtgaaagacagtgatattgttgatactgactctatgtaggcctagactaatatgtgtatttgtatcttagttgttaagaaaaaagttcaaaaaataaaagagataactagacattttttaataagaagcttatataataaggatacagagaaaggaaagagaaaggaaatatttttgtacagctatatggtgctttacgttttaagtagtgttattacaggagtcaaaattgttaaagataaaaattagctattaattttttattgaagaaagaaattttcttaacttttaagtttaggggtacatgtgcaggtttgttatataagtagactcatgtcatgggggtttggtgtacagattatttcatcaccaggcattaagcctggtacctgctggttattttcctgatcctctcccccttcccactgtccatcttctagtcggccccagtgtttgttgttctcctctatgagtccatgtgttctcatcatttagctcccacttgtaagtgagaacatgcagtatttggttttccgtttctgcattagtttgttaaggataatggcttccagctccatctatattcccgcaaaggacatgatctcattcttttgtatggctgcatagtattccatggtgtatatgtaccactttttatttatccaatctactattatcgatgggcatttaggttgattccatatctttgctattatgaatagtgctacaatgaacatatgactacctgtgtctttatgatataatagaatgatttatattcctttgggtatatactcagtaataggattgctgggccgaatggtaaaaaagatatttttgtaaatttagtgtaccgttaagtgtacagtgtttataaagtctatagtagtgtatagtaatgttctgggcctttatattcattcaccactcactcactcagagcagcttctactcctgcaagcttcattcatggtaagtgtcctatacagaggtcactttttttcctcttttattttgtatttttactgtgctttttctgtgtttacatatgcttagatacaaaaatgcttgccattgtgttacaattgcccacagtgttcagtgcagtagcaagctgtacaggtttgtagtctaggagcaatagaatataccatataacctaggtgtatactaagctataccacccaggtgtatctaagtacactctacaatgtttgcacaatgacaaaattgcctaatgatatatttctcagattgtatgcctctcattaagtgatgcatgactgtatttaggttagatggatatgtaagctaaaaatacatgggggtggagaattttgcattaatgtactttttaaacaaagaaatatatatttatcatttatggatgaaatagtttctttttaaaaatgccattccaattggcacaattaatattcaaaatttcacagcacacttttttacttttttttttttttttggtcaaacattagctatagactcactccagtttatttagagtctttctaaatatgttttaaaatacctgaagttctacaaaaagtggggagcctttcaaatgcatgataaactagggtcagtaggttttggagagttgaaagacatttgaaaatatggtagtggcaatggcaggggtatgggctgataatgagacggatagaaatgaaggatgctacaccattcaggattaaaattcaacattagttcaagttttaagacttttactcctatggaaagagtggggaattggagtaaaatccaagagagcaggaactgtctagaagaaaattagcctgcccaatctctttggcttgtttcctcctcctcatggatccctctctattgataaattttaagtagtgcctataccacacataggctccattttccatcccatgccacatctcgagggaagagctataggaataatacacataaactagagtggaattttgattcctaccacttggaacttgactagaatgttgaacaaaccagatcccatttggtgactgtatacattggtggaggaagtcaatgctttgaaaggccaataatcactggactgaagaaacaatttaccagcaacggtcactattagttatggacagcacaaaaaagaccaaagaacatcagtacccaaggccaatttatggaaactaactgaatggcacaaaatcaaccagaaggagcccacggttctgctgacggcagttgctctgcaggtttcaaccatttaatttttgatctgagctcctacagcacaggctctttgcaccttgccctagagaatctgagtaaatgcgtttttatttttagatgttttctctcttgacatagggttccacaaatatgaaagagcaagtcatcccccaggcatgctagaagttgttgttgtctcttttctctccctctgtggtctcctgcaatcacttaaaataataatgtgccaagaaatgttttcctacagaacaggccacttctcttgactggccctaaaatgtatgtgtgttaaaaggattgagtcttctttggaatattaggttgtccctttttgatgaattgaaaggtgttccagacttgagaggctatctcaattttacagtaaacagctattttatgagaaaggaaaaaaattccatgaggtgtttttaccaaaaacgcgattattaccagcctaacaaaagaatccattgtgaggagaaaaagcacagccaacttaattaatatcatttacaatctttacagatgctcacacaatgccacatacttctcatgtctacaatgagtactaaagtcaagagtatgaaatcaaaaggagctaaatgtcttcacagcttctaaaataataattcaaaatgggactgtcggtatttcagaaactacatgtcccagattaacctataatattgggacagagtaaagggaacctgattcaatgataaattacccacagaactatgtggtgtgataaattgctaactcaacaaagccatcaacatattatactttaagaaagtttcttgtttctgaaaagaatcatcaatcaaccttggtacttagaagagagtatcttagatatacctcttctttctatgcccttctaaaattatttttagctagggatgataaccaaaagataatgtagcactgtcaaagtgaagacactgatgtttctcaaaggagaggcattgctatgtgggagactacttatgatccctttgttcttgggctgtagtcccttgttggctgcagagtccagggttcaatcagagatgttcacattataccaagaggcaagagatttctttccttcatggtttcatgacaccttttaagatgctcaattcatgcttatgccagcaaccctggcccctaaagaacacaattagaaatacgttgttctgttcatattcagtcaaagatgctatcttgtccagcccctgcctttaagcaagtgaagcattattcattccacttaatagctgaaagaagtggttccaagagcatatcttttgccagaatccatttgccctgatgcccaatccaatgtgtcttctgctaaagcaaagccaacagcaattaatagacagggtttttatggtgtcccttcatataatcctgtagccataacttgattgagtttcaaaatcatctaggtaaaccatgagcaaaatcgtgtgtaaaaatcatgtagaatgcttaaagtgcaaaaagcaggagagagttgttaatagcgcagactatgtcatcatgatacttagacatcatctgattaagccagtaataaaatgtgtaatcttagaaagtgatttaccctttctgtgcctcaggttgctaatctatgacatgagaatattaatggtatatacatcataaggtcattgtaaaaattaaatgagaaagcatgcagttagccctaagtgctgtacctggcatataataaatgctcaattaatacagctattaatatacaatgagagtgttcattagcaagtactctcattctcatagcaaatacactgaaaaatagcatcatggcttaaatacttcataaagaagaatactgctgcctcagtttacactttgcttccccggctcagaagtgtcatatttacactttttcttgctttgagtttagtaaccatctcttcatatcaagggatgaaaatgactatcattgttcaacccattcagctgagattagaaaaagatttaaccagggatgataagcaaaagaaaacgtaccattgtcaaagtgaagacactgatgtttgtcaaaggacagacatcactatgtgggagactacctatgatccctttgttcttgggctataatttcttgatggctgcagagttcagggtttaaccagaaatgttaacattataccaagaggcgacttgaccaacactactaactcattggaacttctcagaatacacaaggaatccctcttttatatgtcacagtaactattcatgactcatttattatatcctaaaaaacttttcagtatctcaaaatattggtctttggactcagtgagaagtgggttcaaatcctaactgcagcttactagctatataacctagggcaactcacatcttctctatgagcctcaattttcccatttataaatggacataagtataacatagtatattgttataagaagtaaataactcattcatacttaattactctctatcaacatcatcattatcaccaactactcaaaagtaagtatggccaggtgcagtggctcacacctttaatccaaggtgggaagatcacttagctccaggagtttgagaccagcctgggaaacatagtgagactctatctccacaacaacaacaacaacaacaacaaaggaataagcttaagaaaacactatgcaacatattttccaatgtaacactggcaaatgattcctcaaacattgtgtctgtatatctttttacatttcttcaacttgatggtgtcatttgaattataaccttgatgtttaacaagctcatcatctccctggacacatttgttgtcaaagaaagagctcacaatttcagtattgcatttggaatctcagaatttaattttacaaataaaaatcagatgcatacaattcctccatgtatctttactaagccttatatggactctcttgagagttatcaccatcagattttgctgttgctccaggtggccaaagttgtcctctctattccaaactgttgccagaagttggtctacatgcagagttccaaaatcacataatccccaaactcaaagatattacttcaaacatcaccatcagtaccactactttataatgggtttaattatttttaagcatggcctcatcagaggttttaaaatatctttaaaagaaaattttgtgaaaccacttatttatttaaagattaagggacaaacaaaaaatataatcacaatctattttattttataaatccttaatttgtgattttgtttaaaatatgaaatcaataaccctaaactcatgtgtccttcaattacctggaaatatgatcacaatttgaatctcatgaatgttttagaacgaaagagaatcaaacaactgcatttattagaaacacattgcataaaaaaaatttctagtcaacacactggaaaacataaagaatgtaaaattagtcctaccttaaggaaataatacatagacatacccaagaggatttgtaaggcaacatattttgaatatgtgagctgacatcatgtggaggagacagaactgaagaagaaaattgaggaggcaaatgtcgaaagaagtaaagcctccactgacaaacaagaatgggtttgcttcttgggaagaatgtatgtgcaaacatactgaggtagagacaagaaagtttatttctaaagtgtttaacaatattatagaatccaaaattcatgttgaatttcacatacgtatatctacacacacatacacacatgcacccacatggtaactatgtagaagtgatagatatgttaattagctggaatgtaatcatttcataataaatacatagaataaaacatcaagttgtacactttaaatatatacaatttgtatatgtcaaggatatctcaataaagctatttttaaaataaaataaaattcacacagaaaagatggccaaaaagaattaagatttacttctgcatgtaataagaagttattatagagtcaaagaaagaaaaagaaagaaagaaagaatgaatgaaagaaagaaagagaaagaaagaaagaaagaaagaaagaaagaaaagaaaagaaagagagaaagagaaaaaagaaaacacaacaaaatcatatttggaaaaacctcttctatcctcaaatcatttctacacaaaactttcgctattaaggtaaaagagctattattttctttgctataggacaatttttgtggcagcggcgatatctgaactattttcaagtatttcatgcaagacaaaaaaagtattaaaaataaaactatctgcatgctttgatgtagtttgtaaagtgtctgtcctgttttcaaaggagcccttagcttatgatgtatctgaaggcatttagcatttagttatctgataaaatgacaaaggactgaaatagactgcagagatcttatattgacttttgttacatccagggatttgagaggtgaagtcatgctagagaaagcacttctgccagtagatgctgacagattcagcagctcctcagacaaaatggacatttctctgtcaatatgagtcctcaactctgtgaagtgtctcaagcaatcccagctgcagaaggatgtctgcagaaggatgccaagtacagacacaatctgtcccctctcctaaaatgaggttgattctcattattcttaaggagtcacagacaagctgttatcaatttgctcaagtgaggagcaaaccatagcgagctgttgcgacacttaacatctaggaaagcaacataaaccaaatgtgcccacagccccaacgtaccagcaatttctggacctatctaataatagttgagacaaagggaagaatgaagcctgccacacacacctcactcgccaggccttgcttttgcaataatgaactaacagaaagaggggactgtttagtaactcagctccctcctcattattgcattgcaaaacagtccacagaacaagctactccagctgcctgccgatggtgattttaccctgtttcatacactatccttgggcatcagcaatgcagtggtgtgtgaatatacagtccctgcaggaaatagcatgttttatggaatgaagcattcatacaattcaataagaaaaataaatagaaagacataaatggaccattcacaaaagaacaaaaatgacaagtatgagaaaagatttgacctcagtaataagaccaaaaaataccctcagaaattaaacaaaataataaagcattttcccattaaaatcagtcaatattttaaaaagtaaaaaaaatgttctttgctggtgaacttgcaatgaatttggaatgttcatacattgtttgatatagcaaatattgacacatacttttgaaaagcagtttgccaataagtgtttgatgctttgaaaatattcaaaaggaaaaatataaaaatattcctgtttaaaaatgtctactccagctcttgcatataaataaataaataatgaaggcaaaacctcataagaaacataataataaaataataaatgtttaaggaaaccatgcagaaacaattaaaaattctgttagtgaaaactatattacttaagacttctatgattttaaaaattttattgtaaaaatatttcctatatacaaaagagcaaatataactatcataaacactttctataacatagtttcaaatgaaaaaaatcaggacacaaaattatatatacaatatgattacaactatacataaaaattatctttgcaggaaatatgtctagagagaaataacctgaagtcttaacaatggctattctttggtagtgaaatgatagggttttttcccctactttcaaaacattaatttctgctacatataagctcatcatatttactatctctatcttcagatgctaaattggaaaaaatgtctgagccactatagtcatctttttatttttcaacatttattgagttcttcctataattataaaacactaggtatcaatggagaaataaatgtatataagacatattttatgctttccagaagcttataagaaatacaacaggtaatggaacagcaaagtagaaaaacaaactcatcataaatttaatgaattgaatttgtatgtacacagtggcattgtacaaggtgaacgatgaagaaaatgtcgtggcattttgtccattcctcatatattggtaatctggacaaacttctccaattaataatttcacattatcagacagaatcaaggtaataggcaaatttatcgagaccaaagaaagaagccagtaagaaccacctgcaaagctgtactctgcccttttttaacctacctgtggttatctatgagtaattttattcttatgttatctttataaccttagaaactcacagattcctgatcatagatatcatcttgactacagtttccactcatttcaaaaattcactctataataacattttctgtgatagggaagctgaaaactttcaaggcagtgccttccacttatggacagtttgactcattctacacatcttccaggtataagcacaggaatagaccctctttacacaaggcaaataaggaaaggctcctgccctcaaagagttcatgatgcagaaaggtacacgtggaatgcataaactcatccacagtcaagagccctgagtgacctcctgggtgttttactgtatttctgggatgggcaccaaggaaagtggctacttctgctttgcagatgagcctggtcaagggttagcggcactaaagcattaaaaagagaaaaaaaaaggaactatagttgtatactttcaggaaacgcctcttaaagatctgaagatttacaattcttttttttttaagccaaaatatgtgaaagactcacatgcttcagcaaagaaatctatttaggttcatttaatctttgcctccccatcccctcccaaccaccaccacctatttttaaatgggaccatttttcatgttatatctgttaacatcccatggaaaacccattggaaaaagctgctctgaatctggccacacatctgatagtgataaactgaggctcagaggcctctgagctcagtaaattacccgcccaaagtcataccagtagctgtgacagaatcatggttggagcccaggatactgagtcatatccatgctaatcctatgtcctatacatcatagaccctgtcacactttttattttttaaaaaaatcacatattttggatattaactgacagaaccagcatattttaacacagagcaggggaatactagcaatgcaaagagtaggcaaaaaatatgaaggtctaaagtgaatataagtcaacaacacaacatgaatttataataaaagaaacttataatctcaatctggaagagagaagaccaaccagtcacaattaagggactgaactaattgttccctaaggcggtcatgttctctaaatatctgtcaatctgctcaagtgccatgtaaaatgactttacatggatgcagcgctgtttatataaagttgatcatccctatggagaagatgaacaatcaaaataaacaacagagtccttctctgaaaaccctctaatttcacaatgagttcctaagggaccatgtgtcttctgtactagaagtttcatttaaaaacaggatagattaacatctactgggaaaggtataagaatagtcttgccaaaaggaaaagagatagacttgataaaatttcaaagtcattgccaaccttacaagacagcctgtgagtcagaggatggccatcctgtttatatgccacccagagactgtctctcattctccttatttttctcatattttgatcattttattgtttactggaattttgtctaccctatgggaagacataaaaatgaaggaagactggaaacattattatattgaattctttgctagagatatttattttattgaacataggatacaataggagaaggtaaaaattacagctaaaatatggtttagattacatgtgcattgttccataccatttcttgatcaaattagaaacaaccttgaatgtttggatggtaatcactgaccaggttatgtttgagaagagttgctttagttaattttccaaacttagattttcagaatcaattttcctacgccaaatcagacctgaaaacaatttgaactgattctccttctcccttatatcttccccctacatctctttttgtaatctgcaactaaaaggaagtacttctgagaaggctttagaggaatttcaatatgtaattaaattggtacctttctattccatttaacttttaattaaaataatataaaaacaatcacaacactaacatttctttcatttaaaataagaatatgtatgtttttggcttatctgaattaattagcactgatggtctttgattacttttgctcataatgaaagaaagaggtgggctgagtttagcacttacaacctaaagataatgcccaaggtttaaattttaatgattttttaaaaaaatcaatttgcattgatcgggcttaagtcctcctgtaagtactagtcaaaaataaaagtctcttcaattaagtattatcagaaagaagaaattaccaatctcctgggccacaagtgtgcatgaaacagataaaaatgatgtttctgcagtttgttatttccttgaacatcccccaaccctgtatcctgcatcatattgaccagaggaagtgaaatccccctgtgacctgttggcactaatcatgtcccataactaggcagttgacagaaccaaatttcagtttgtgtaatacttgagaacttacccccaagtctttctagtctcttcaccaaccttctacctcagcgtaagaaagaacaggggagattataagcaagctaaagtccttctaatctaccctcaccacccacaaagcctactatcacctggatttggcaataactatgactgaattacggccctgaaattgaccccacgaaataacaccaatgtagaatggttagtcaactacacctgagttgctcccgtccctcaaacactggaaagaatgcttggtctgataactaatttaaattatttttgtagttggaccaaaagaccttgggcaaacataaatcaaaacatgagcaaaacacagcttttaagaacagaaacttttggaatcaggcaaacttaagttcaaatcctgacacttacacttgttctgggaccttagacaagtgtacttctgagcctcggcttcttcctgtaaagcagggatcctggtagttcctcacatgtcagtacttattcagtggtaactattatcatcactgtcttcttagcagaacattcccaggacacagaaagcctctctttattttacacccaatatcctgcagagaaggtgtttcctgccctgtgacttaaccttaaaatacaatgatttaacaaaagtacgtgatgagactaagatctccattttcagcataattgaagtcacattacagaaactagaaatcacttcataaaatgcactgatgatgtacatttatttttcaacactactttctagctttgtcagcacaacctcagcgagggttcctcccatatgacagggtattgtttcacactaagggtggggataggggaagggttagggagaatagagagtggagaaaaatgcagttggaatcaaagtaaggtttgcctcaactttctaattatctgtactttgggaaccaccacctatttgtgcaagaaggaaaggcagtttggataggggaggaaaaagagcagcaaaggagaaatcactacatattataaacaaaaactcagtcttcacgattgacagcttctcatgggacttccctggggagccaattagtgctggttgctgaagtgggtttggtcctataaacctctgtgctaacgcccacctgtgctgcaccaacctccaatggagccgcaaagcctctgttaatgaggcttaggaccaatcatcccacagagagagttctgctaagggctccaaagcagatgtcttagggtaaccgtcagggaatctcccttaaattccattgcctggttggaaactaagacattttaaaataatgatttgatttattctttctgcacctctttttctttgttccttaacacctgagacaaccgtgaccacagcctccatgtaaattctaatccattgcccgtctagcggctgggtgacgccacaaggagcagagaagaaatctaggcaaagaacaagtgacaattagtaacatctctagaatcattgtctccagtagcagtgggagatgcagttaaaactagctctacacaacagttaaagcagagtttagcaacatctgggaagttgcctgattgctcttgcaataaaatgcttcatggtttctgttgcttcaatacacagagctcaggaggccttgtgaacccgtttaatgtaagctcaaacaaactgacaccagttttgttattttgtctcctatgaacaacattcacccttatagaggcatacctacctggttcctgctatcaaaaaatcaagcaatgaaaacctattatgaaaaataaacacctattatgagcagagcactgtataaggcaccctggaaagaaaagaaaattcctcaaagtccttggctttgagaagcaaaaattagtaaaattaataccagtgacactacatgtgaaaaaataataaactaaataaaaataatatcactacatgtgaaaaaataataaactaaaaataataaataccagtgacactacatgtgaaaaaataataaactaaaataaaaataataaaataaataataaactaaaagggatttctgaaaaggagacaaaaagataaatgaggcaacaattccccagaaaccagatgtgaacttaactttttaaatggtgagacttagattggaggaatgggcaaatatatgaaaacaaagctttagaagtgggaatgcacaaaatatgaagcctgaaactataagacccaatgatctgaaaaatgctcacattctcctcaagctcaaatgttcatgaaaataaagggaaataaaagatagtttcctaaacctcatgtaggccaaatttttcctgacacgacttgaagatggctgagaaaaaaatgcctgttgattaatttgactgcaatacaaacagaataggacagtaccttggcctagctatagccaaaacaatcacaaaaacactagaatgaaagctctctgcctccccaggccccacgctctcattgttgctggtaacagccatctacatcaacaaatcagaattggagaagatagcccagagaacaaaagagggaggcactaaagtcctttcacatgtactgggtaagtggactagaatgtctcagaagatgtgaagtacagttggttgccaaattcagcgacatctgtcaatgtttatctcaagaaaagtacatcaatctaacactgagatggcactgaactgggggtgtgggatacatcctaaggatctgttattctctttggcttgcttgggacacctctgaggttggaagaacctggagaagttagaggtgacgtgcacaccctgctcacacccctcattccatccctgattatggagtgacaacattttgcaagtgagaggagaaactatttagtggaatctttactcagaaagaacccttggaattcactcattcatttatccaacagatatttatcaagtgccagggaacactgtgctggacaccaaggatatcatgatgaaaattacaggcatgtttccttctctttgtagtgtattacacgagagagggcaagtggttgaaaagtggaaatatagttatacatgctaggaggctagaaaagctgaatgcagtgtcttctttaccccattggtgagggaggagttcccaccctagaaatatggggatggccaaccacatgacactcaaccttaacagaggagattaatagcagttcgctagtcatatctactcacagcccaggggaggacaatgcaccccacacaggccacacaggggccacactcaggaaaggtgaacaggcagggcctatgtgaggctggttttgaagtaacagaagggcaaggtagccctggtccccacaagaggatgtgactggcttgtttgaataattccacaggctgtgagggaaccaaaacccactcctcagggataagcagatactgggcctggtcctcaagataaggaaagtcatttggctaggagacctcacccacaggagcacaatggagagggaaatttgtggtcaggctgtctgatgagctcttggttttaccttttacctctcttggaaccttaattccaagccttaacctgacacagtggcagagcagagaatgatttataggctgcctcaaggtccaccctgggattacagatggctcaatcaggaggccttagctggtgggaccctagactagaaaaaaccctttttctgttccactcccactctgtacctggcaaaacagctcaagcacataaaaggggccagagtcacctgccattaacaccttgctccttcaaaaaatgctgtacttgctctgagacatcacacctcctgccaagctgagccccgagtcagggcagaggagagcaaggtgattctttgaagcagcctctctgacaattgtattcactacaaagtcaataaagacataaagccccatttacattagtgaacataagttcacaagaacaggacagaagctacagaactgcaaagagcgttggtccctcctgagatggcagacagcttgggagaagcagctgtccacagtagaaggaagaaggtgctttgcctcacagggcttgctgagacctggcagaaggcaggaaactagatgcagcgggaagaaggagcagacatttacaagggctgggtccgctgttgtcactcaaacaggcagccaaatttctaccctgaacacaatcttatcatcagtaaatgcaagggagaaagagagagagggaaactgattaaataagttaaatctcttgcaagaagtgcaaacagtttgcttccccacagcaggatattggaaagccccatgaaagcaggctctggagagacatagatagtggaatgagagtacttttttaatataatttttataaagaaggaaaccttgaagttcaagagtctggcaatctaaaatttttgtagagaaagaaaagattgggttccaaatagataagtgctggtgggcatctttctaatttgctcacttttctttcttggcatcctattaccattggcagcttctccaggctgctgctgcttcacccttgggcagtctgtgcctgagaggatgcttgctggtaatctgcaaagggcaggagactaggcaatctccaggcttctgtttcctgagctctgacagcacccaaacatgggtgtgcatactgtaggcattagtcttcactctggcccaattctaggtggatatacaatctagtcaataagtttcaagagtttatttctaagagagcaggaggaagacacccaagttatacccatctttctgtcttctcagggctatcggtgaagtggaaatagaatgtcagtagacacattttctcttgcattccaggctcaaccaaatgacttaactatgttctcctgtgctatggacaaaatgataatgtcccaaccattttcatcttgagcagatgtagaggagtgaagaaaagtgcacgtgtattatcccaaacccatgtgtttctgcccagattgttcagggactatggtgctctttctgcttttcctctcatcaggcagatcttatgaagatgacagtgggggaacactaaactatgtgcagaatgaagcgctatgcaaaaagttatcgccaatacatatagaataaggacgtaaaactgtccgtgtgtttccgttacatttacattagaaatatgattgggaggaaaggattggaaaatatacaacagcatataagcaaagagatgagagaggagaggaaatcttcatcagggccagttattatctatcagggtctacaagcggctgtggttggagtagaactgtttcatgtgagggttgtgtgtgtgtttatatctttctgtattttctaattttattaatgagatcatagtatataaataaaaatatttgaaacacatacacataaaagataattagagcacttcaaaaccatgtgctgtcatacaacctatttgttatagatgagaaagagcttgactggaagcagacatactcagttttgtctctaactgtatacttcagcaaaatacgctttgggcttcagtttcctcacctgtaaaaataagaccaccaccacctacttcacagggttttcctaggattcaatattacatctatgaaagcaccttggccagtgctggtacttggaggcatcaaaaaagttcatttccttaccttttccacaattcctctgctcaattcagggattcaatcctctgttttgattcagggctctccacagagattagactgtagagggcttaacaacttgcaaaaaaagtatcagacagctgtttccagatctgtgtttgctgtcttttttgcaccaaagaaaacacttctcctttatttgtaaaatctgctgtctgtggcaagatttatcagggcgctgtaggagtttctgacaaagaaagggcactcttccacgttcattcccagtcaaaggctggctctggggtgctggtagtggtacttttccctcacttactagctaacttaaggctatgaaagaacaaaatcacttaaaaccagaggaaatgagacctttccaagccctaatcatgcaggctgtgcaggcaccaggtagagagaaccgctacagcaccaagcacaatgaaaaattctagagcagacagatgcctcattcctgttaccaccatagtcaaggtcatataaggaaaactgccagatgatggaagaaaacaaacattctcaagaaaaaaagccttcatcatgcctgtttacaacaaaatcatcaaatctgagaggaaatgtttaagaaagtaatagatacaaaattcagtaatgggaggcgcacattttatttgcttacttctaggacccaccactgacttagaagccactcccctaggtctctccaataaaagcttatctttaccaaaaggaaaagctttggcactactacaaagaataacattagtaaccaccatagggaggaccctcttcgggtgtggacggctacctcacaggcttagcaacttacagaaggtacctcagtagcacataatgaagggcattgcaaagtgatctcaagtctcctggacagcctagtttcaaggcaaaagcttaaagtactaagaattagttttgcctctgctcccagcctcctgtgggagagcaggcagatcctctgggtccaccatcatctcttaaatgagagcattgtgcttactatcaaaaagctctttgatctgaggcccaaaatcctactgaagttctatgccatattttgtgtctatgggcagatgttcatttttctgagagaagttccatgtcatttgtcagatcctcaaagaggcccatgatccaaaaatatattaagaccaactaaactaaataacttacaagctttcttacagataccaatcattagaggaagtttttctgattataaaaacaatgcaatttattgtagaaaaattgaaaagtgtaggcaaaaagaaaaatctgctgttattgagccactcagaaataaccactgctaacattcatatatacataaatatttcttggccgggcgcggtggctcacacctgtaattccagcactttgggaggccgaggcgggcggatcacctgaagtcaggagttcaagaccagcctggccaacatggtgaaacccatctctactaaaaatattttaaaaaattagctgggcgtggtggcacatgcctgtagtcccagctactcgggaggccgaggtaggagaatcgcttgaacccgggaggcagaggttgcagtgagccgaaatcgtgccactgcactccagcctgggcaacagagcaagactctgtctcaaaaaaatacaaaaaacaacataaatgtttcttgtattttgtatttatatggtattaggctctgctacattccacattttcacacattaaaaattcttcaaaaacagcaactttaatggtcacattttatcatagggatttaattacattttatctaactgttttcctgtggttggacacctgtgttgatactaatgttttgccattataaacaatgctgctgtgaacattcttaaaagaccaatttggttatatttttgttggtaatagctactaacaatttttgggcaagaaaatagcaaaatctccagaactagggatctattgtacaccatggtgactgcaattaataaaatgtattggacacttaaaaactgctaaaagagtagatctcaaatgttcttaccacaaaaaagttatacatatgtaagatgatgaatatattgatttgcttggtttaatcatttcacaatgtatacatgtattacaacatcacgtttataccatcagtatacacaatatttatttgtcatttacatcttaataaagctggaagcagaaacaaaaagagcaaaatcaatatttatcttatgatagtacaggagatgaattgaaatggggaagactaaaggcttgggaagactaaaggcaaacggtttttatctgagaacttgaaccaggggagagacagtgagactgaacatgaaggtccagatacggaacacatgctaaagggaaattgccataagtcagtggttcagagggagacagaagaatcaaagagtcagctgactttctactttcacaattgaaagaatgagtataccatgaaccaagacagggaaagagataggaaggtgaagagtcatttctagaaggtcactgcaagaaagataactgcaaatgtcatgatcgaactgcttctttttatcataacaaaacatatccccaaaaagcaactgataatctagggtactcatttacagttacataaactagaaagtaggagacaagggaacccgttggtgtaacatctctttgctcttgaatgttcaaatctaataaattagttattaataatgatatcttctaaagcataaaagctgagcagtttgtatcattcagaccagaataatatttcataattatgactatatacctagaatggtaatttttaaaaattataccacatttttcatctttatctctattgttttattttgctttttatttctataggttattttaatcaattctatttcaaataaatgaggtaagacctatgggaaaaagaaaagtccagaaatcaatgtcactaacatataaaacaccaccaggaggaagtcagctagaaaactaattcagtgatgacattttgagctctccatgacatagtaaagccagtaggaatgataaagtagagattttctcaatgaaatctccgcttatcattcagatgtctgaattcagctctgaaacagtaaccctggacttaaatttaaaatgtcatattttatttaaatatttaccatgtaaaaatttctatgtcattctttattattgaaatacgttctttccaaaaacttcagattgccaagcaaagatgtagctgaatttctgataagattctttgaaaacaccatttttactgattccagaatactcaagagaataaaagatgcagatagtggccatctagcagagaggaagttgatgttctcttcattttagtacgaggttactattattttctatagccacctttcctggtatgataaagctattacatatgtatttattggaagctgttttcacatgccaggcactggtactaggtgctgatgataccatcagcacattttcacattttcacacattaaaaattcttcaaaaacagcaactttaatggtcacattttatcataaggatttaattacattttatctaactgttttcctgtggttggacacctgtgttgatactaatgttttgccattataaacaatgctgctgtgaacattcttaaaagtccaatttggttatatttttgttggtaatagctactattacatgagatcaagcccatagaaatgtaattgatctaattcttttcttgtaactggaaattaaaggaacaaagaagctaactaattccttttaacattaatcctataatttcaccttctaattctttctttcacagtcccataataagtgagaggaaaattgactggttacatgagagccagtgaggtgtaatccccaccaaagaaaaggccctatatagtcattctgaaagccagagaaaatatgaggagaaggttttaatagctccaagacttccctgcgctaatctggttttcagataagacagtgagaaatgtggtaaaaacagctccatgtgtcatttcaaatgaaatacagcatttaaattgccttagtctgagttacacgctgcactaagccatacttttccatataaagtaaaagatacaacctctgctccaaaggaacatgaagtaattcaaaagaatggcacacagtattgagaatgacaaagcacctagagaccatgatctattccctaattgcaggaaatgaagcttgaactttacaaaataagattcaaagaaacggaggagatgaggaagaagaaatggattctagagcaattcctttgtggcagtgcataaggaaagggacagaaacaagaataagcatactagctcccaagataagcctagagagcaagactccactggtattcagtgtgccaggctcctcctacagaagaaacagtgacattaatttgtgctagaatgtggtctataaagggatcatcaaccctccacctgggagacagcattaaaattatgctctgcagattgctaaagaggatgaccccatacaacacaaatcaggagaacatggtaaaactaagatgaccttgagggtccaaaattctagtgaaacattggcaaaggccctagagatgttgggctggagtgtttgtcatcaacccgtatacttattcatttgctgttcatttagtaaacttcagttgatgttacaaaatttccctaggcaaatatgcatgtaggaaatgaactgcaatcttttaaaactggtgtttccatcaaagttagttcttacagctccctcgaagaagagatcacacaggtctgcagatcttttagaatggcattggtttatcactcaacagagaagactgccagctccacaacatgaaggcagtttattcttctccaacctagtgctgattaggtatagactgggcaatctaccacatacaacccagaaactgaaagagagagaaggcaaggactcagaacgtggaattgtatcagttagacaaaaatcctcatctagttctggaaggaaatgaaacctagaaaaaaagaactgctgcaaggatataaagaatttaattgttaactgaggccctttaaaaattatattataatacctcggcagaagggaatatgtcattcaacctaatgacttctccgcttattttaggtatactttttctaaatatcctggaacaagaaactgagcactgtgataaacagagaagccactatctataatgtgatttgtgtatttctaacagttatacgactacctcaaaacctctctcacacttatttaccatggcaggttcctttccttacactaactgggtattttgtttattaataattatttagcacagactataatagagacatcaggcttgatgctaagggcagagtgaagaagataatcccttcttaaggagctactgaggaagataaacaagtaaagagggaactgaaggtcagtgtggtaattttaacactaaggataagaagagggcatgtaactcacccttgagagaggcagggtcaaggaagtcatctattcagaggtagtgtcttagcaaataaaaaaagaataagaactaggcaaatgggagaatggaaagacactccaagcagaggcatcacctcttcaaaggcttagaacctacagagaaaatggtacatacggaaaatgcatccagttcaaggtgaaaagaagatccttggaaggtgagcaagcaccagataattaataatttttaagtcataataaggactctcaattctgagagcaatggagagctactaaagagttttagatctaagaagtggcaagaataaacattctcactgccatatggaaagtggattagagatggacagacagactaaaggcagggaaattagttaggacactgtagcagcaattaagcaagagatggtgaagacctgcaccagagaagtagaggcaaaatggtgaaaagtaggtggaatcaagagtgatagaatccacagatcctaacaacaagttccatttggggtggaaaagagggaaggagaatcaaaaatgccccccaagttacttatcactgaaacagagaatgcaggaggagacgcagacatggtagggaagatgagttctagtctgggcacactgaatttgaggtgactttgagaaatcaaaaaaaaaatgtccactcagtgacaagccagagagagatctggcctggccacggagtgatcaatacatgagtgtttcttgggaacactggaatagatgagcatgcccagtcagaatgcatgaaacaagatgtgatgctctcaagacattggtctcagggcatcaggagatggtgaaaggatccatgttaccttaaaagggaggaagctgatcctctcctgatacactggaattatttgtgcatctcatcagctaatttttagctgagtatgaagaggtaaaccttgaaagatggtgagtcaggcaaatattgatgatgggggtagagaaaaacaagatgaagttaaaaagcagggtgttcaacattagttctagacaataagggataaaaccatcacaactgggattcttaggcaactaaggagccacttaaaatcagtgatcatcactttaggttttattttgttgttatttgtttggttcttgtcgttgttgttgttgttgttgttgttgttgttttgagacggagtcttgctctgctacccaggctggagtgcagagtgcagtggtgcaatctcgactcactgcaatttccacctcccgggttcaagcgattctcctgcctcagcctcccaagtagctgagattaccggcatgtgccaccacgcccagctaatttttgtattttcagtagagacaggttttcaccatgttggccaggctggtcatgaactcctgacctcaagtgatccacccgcctcagcctcccaaagtgctgggatcacaggcatgagccaccatgtccagccggattatcactttaaagagaacaagaagtatgtgctcttcagtgactctacaacctcaggtacagaaaaccaagcagagatcattcagattgcttgggctattggcagtgtaccataaagctatctagaccagttgttttcaccttggctgcattcccacttggaaaattttttaaaatgcaaatatccagatgtcctatggacccttgtaattcaaattatatttttgctaccagcagtattagcatctgtgacagtgtgtaatatccagaccacaaattaaaatctgtattttcctaagattccctgggagatgtgcatgcacattaaagcttgagacctgctgcctcagaatcacttgaaggagttgttaaaacagagattgctagatcagggatggggcttgtgaatttgcatttctaacaagtttccaagtgctgctgctgctgctgagaggctaatactgtattttgagaatttctgccatagaacaattcagaatctcgctggatgggacccaggcatcagtatatttttaagctccctaagtgattctgatttccagccaaggttgagaaccactggtaaaaatatttttctgctcttcattacataagtaaggaaatgactatgagaagcaacttagctatcctctaacaccagcttaaattcatgactaaactgttctttaatataagataaaatatatttaatataattttgattaatcaaaagagaaagaaagatgctgcatcatccttagtgactcatttccagagatatgtttggttatgattggaaaaaaggtcaccacaagtaaccattatcttaatcattacagtaaccatcaatcaatttattaattttaatttctggtaatttaatagggtattggcattttgaaggccacaatgtgttttttgaactcatgtttttttttttaacagaagcaaggttgtataaattatttttccccagtcagcctacaaaaccaattcttttcttctgtgtgctttgggtttaattttaccttcttttttctaggttcttgaggtaaaagtttaggttattgatggagtctttttctcttttttaatgtatgtatttggtactatacatttttttcttggcatggctttagttgtgtcccacaaattttatagtgcatttgtacttttgttaagcttaacttttttttatttcccttgagagtttctctttaatccatggatttttagaagtctgttgttgtttagtttctaaatgtttacagatttttctattatctttctcttattgatttctggtttgattccactgtggtcaaagaacaaacactctgtatgatttaattgttttgaaattggttgaggttctttacatggcctaatcatctgtattgttataaattctatagacacttggggaaaatgtgtattttgctgttattgaaaggaatgttctctaagtgttgattagatccagttggttgatggtgctgagtttttctatatcctggatgacttatagcctagttgttctatcaattgttgagaaagaagggctggagtcttaactgtaattgaagatttgtctatttctcctttcagttccatcaggttttgcttggatattttcagctctgttgtctgcatatgcatttaagattgctaaattttcttggtgaagtgacccttttaccatgcctaattaaacttgcctaaagctgactccttacacattttaagttaggcctgatggtttatatgtatatagtgaactgtaacctaacagggtgtgtaaatagacagcaacctactcttgtaagtagcagagtctcagccaatcacagcagccatactttagcattcacagacagccaactactcaaaccttgttcaaataagacacccagctgtaaccaatccaggtgtttcagtatcccatttctattttctgtacatcactttcttttttctttccacaaattctctctgactacacagcagtgccagagttgctctgaatctattctggttctgggggttgtttaatttgcgaatcattcttagcttgattaaacttgttaaatttaatttgtctaaagtttttcttttaacaccattttataatgtacctctttgtcactagtattttttttttgctctgaggtctaccttatcagatagtataactatttctgcttttctgtgattaatatttatatgatatacatttttatctttttaattttgaacttgcctatatcattatatttgaagtgagttgcttctagacagcatatagttaggtcatattttttattccataatgccagtctttgttttttgctttgttttgctttaagtttcttctgtttgttttttcctttacatcatgtgcctttatttttattttttaattgtatacatttaaggtatataaaacaatattttatatacatatacataataaaatgattactacagtcaaacaaaagaaaattagcatatccaatggggaaaagcggattttcctctaaaagccagtacaagacaaggatcctcactctcgccacttctagtcaacataatactgaaagttctagcaaaagcatctagagaggaaacagatttaaaaatatatccatatcaaaaaagaagaagtaaaattattcctagttgcagattacatgatacaaaattccacaaaaatctgttagaattaataaatgaattcagtaaggctgcagaatacacaaccaacataccagcatttgcatttctttacaccaataatgatctatccaaacaagaaatcaaggaaaccatcctgtgtaccatagcataatgcagttatataggataaagaattctagagatgtaatgtactagcatgagggctggagttcataatattacatcatatactgaaattttgctaagagaatagattttatgtcttcttaccacaaaaaaaggtaacaatctgttttttaattggtgcatttggactatttacagctactgcaataattggtatgctagggcttaactctactgttttactttttgtttgtacaacttttttagtagctgctctaggtattacatcatatttgtttaatgtatcaaagtctattggttttgtcattttatcacttaaagtgaagtatagaaaccttacctctttgaacgtccctttaaccctccacacttataattcccttaaatattttctctacatacacttagaaccacaccagaaaatgttataatttttgtcaaccatcaaacataatttagaaaactcaggagaaggaaagtctatggtatttatacatatttttgcttaccatgttcttttgtcctccctgatgttccaaggttcctttttatgttacttcctttctgcttagctaacttcctttagccattcttttacagcagatctcctggtgataatctgtttttatctaagtatgtcttgatttcctcttcattcctaaagagggtgttttcactcagtataggtcacaattcttatctttcagcacataaaaaaaaatgtgtgtcacttctttctggtctccatggtttctgatgagaaatctactgccatttcattgattttcttatataagtaaggaataatttttctctggctgctttcaagattttctttgtgtctttcatttttgaaagtttaattatgaaatggtatgaatttctttgggtttatcctgtttatggttcactcaggtttatgtgttttaccaaatttgggaagtttgggaccattacttcttcaagtagtttttcatcccatccctctttctcgtctctttctgtactctgatgacatgaatgctagatcttttgttataattacatgggcccattaggctcttgttttgttttgttttgtttttcccatttattttttttctgttgtttaggctaggtaatttctgtcttccattttattatttttttatctcctgtattctgcccatccactaagctttttcttttagttattgtatttttcagttctaaaactccacgtggctcatctttttctcttttatttctttgctgagggcttctctttccttgttcaggttctctactttttcattcattctaaaggtgttcagatttgctcattgaagcgtttttatcatgactattttaaaactgttgtcaaataactctaacacctctgtcatctcagtgttggtatctattaattgcaattttccttcattttgagatctagttcttggtataagaataatttattaaaacctgttcatttttaaattatgttaagagatgccatttcttatttaaatcttctgttttaattggctttctctgacacttctctggcaggtgaaggggcaggtggtactgcctcatgatttccacatggatgcaaagcccagattccccattcagcatcttaggaagaggctccttattactgctgggtgaaggtgagaattctaggagttccaactcccagttggaacactgtaatgagggtggccttgttatcatagggcagtggtgaaggtcctgaatattgtctaggcctccacggacaccagcccagtcaggagaagaaagagcaccctattacttccagatggctttggaagtccagaattaccatgtggtctccactgacactgagaatagaaatggagctcagtgatgataaaactcctggttccctccttgccttttctgacactatcccagtgtggacattggggtacttcatcagaatctcaaaaaagtaaaaacctaagctcccgacatggcttttgcaggtatagatgtgactgggtccacaatgctttttctgttatttacctggaatatggtggttattatctaaaagttttgtcttgttaggttgaccctctctggtcctttaattatagaaagcatgcttttgttaagaatgtttttgcttaccatgtaatgcattggtatttttgtgttgttgatttctttttttttttttttcttgagacagagtctcacactatcccctgggctggagtgtaatggcatgatctgggctcactgcatcctcgacctcccgggttcacatggttctgcctcagcctcctgagtagctgggactacagacactgccacgatgcctggctaattttttgtgtttttagtagagatggggtttcactatattggccaggctattcttgaactcctgacctgatgatccgcccgcctcggcctcccaaagtgctgggattacaggcgtgagccaccacactcagcccatgttgttgatttcttaagctccaagtctggtatatatgagaaaaaaagaaaacccagggcactccaggctgggcaacagaacaaggccctgtctcaaaaaggaaaagaaaaaaggagagatactctatttctatataaataacatcgttttaaacaacattactcaacatatgcaacaagtaagtcattatcattcctagagtaaggaatctaaattgattgaaactcatgtgacacagcaattaatatgtttttcttttggtcccaaggccccaagctagtctgccttctgccttctctccatatttcagagtattcctctatatacatacatatatatatataaatatatatacacacatatatataaaatatccaagatttttagttgtatttagcaggaggaatagggaaagctatgtatactccatcttcctggaagtctcaattctttaataggatgaataattagtgaatataattaaatttaacttttgcagaatagaaattatctgaaaacattactaagtcactaacagtagcttaaataaaacaagagagtaagaaacaaaccaggaacaagtacaagccaaagttatagatataatctgaggcagggagagctacacttcgtggcctcaggttcatataaccagatgtcagaggctgctggaacaaaccctcagcacctgatgcctgaaaacaggatgcatcatgggccttgagaagttacttaactcttcatcagtaaatagcatcattgtgagagctaagcaagttggtaaacataaataatatatagcagggccaggctcacattaaggctctataaatgttaattattaacttactaattaaaaatatgtttattatctaaaataagggctgagataaaaatctatctggtgtaattcttaggccacaaatctctaaggctttggaggtcaatatagcagaggacattaagttcaccattactgaacttaacatgtgaaacacactgcctgctgacaaggacgtttcaatcatttcaggcacctgcttaagttcataggcagcattgtcaaactagtttagaaataaatattgaaaaagagatacatacaaggtcagggggagctaagtctacccctccctctctctctactttgtttcagtagcagacttcgctgttagatactttctccatacatacaaggtcaggggagctaagtctacccctccctctcactctactttgtttcagtagcagaattccctgttagatactttctccaaacgtacaagaaagtacctcaaaaccacacaaatccaaaatcaaacttcttgtcgttcctgtggaaatttgctcttccttcagatttccctatttcagtaggaaatattaacctccaaggaaaccaaaacagaaattacaataatcctttatttgccattcctaaaaagtcactaaatgtactgattctatatccacactactttaactttattcctgtctctccccactgtcatttctgtagtataccaactacgatggctgaaatctatgaaatctttacaaagaattattctaaatgataataaatttatgaaaggaacaagaatttatttcaatagatagtagatcttattcaggacagttttaacatgaccaaccctttttttaaaaattaagcaaaagaaatgttaattattaacttacttagttaataataaacttagtaaaagaagtgaaaaataatagaaaaagtaagaataagaaaagaaggggccgagcatggtggctcaatcctgtaatcccaacactttgggattgcctccctgaggcaggcagatggcttgagcacaggaatttgagaccagcctgggcaagagcaaaaccctgtctctacaaaaacgtacaaaattagccagtcctgttgatgcatgcctgtagtcccagctacccaggaggctgaggtgggaggatcacttgagtctgggaggttgagtctacagtgagctgtgattgtagcactgcactccagactggccaacaggaaaaaaggaaaaaaaaatgagagatactctatttcaatagaaataacatcgttttaaacaacattactcaacatataaaacaagtaagtcattatcattcctagtgtacagaatctaaaaggattctgtgatacagaaattcatgtgatacagaaattaatctttaaagaacaagagagaaataaacatatatatatatatatatatatatatatatttctcaaaatgagctctatttgtcaggcaagactattcagggaaaaaaggattatacggtaaaaaaaaatctggaatatgctacatttgatcaatgaagattgaagagtgcattagcatattgtaggttggaagtcctgtggtaacttgtttaatttggtctaatatgaagatcccaaggtttcagtgacagtgaaaacattctttttcctctaagtggctttcatagaaataatgagaagctccagcttagaaaccacatggagtccatcatcattaaaaatttgttgatttcaaatgaaacaaataaaatttgttattactatgttctctgtatctatgtcctcttgtcttctttcttttataaagacacgttttgttgggtttggggcccagctggataatccaggattattccatttggagatcctcaacttaattacttcttcaaagatcagtttcccaactaagttcatattgacaggttccaagggttaagacataggcatatgcttttggaggctgcagttcaatccactacatatgagttatttggaagcatgatatttagtgtccagatatctggggacttcccaggcatctttctgctactgatttataacttaattccactgtagtttgagaacatagtccgaaatctttttaaatgtactgagatatattttatggtctaaaatatactttatactggtaaatatttcatgcacatttgaaaagaatgtatattctgctgttgttgggtggagtgttctaaaatgttgatgcagttatttgattgttttttcaagtttctatatctttactgattttctgtctacttactctaccaattactgagaggggtggtaaaatttctgactataattatgagcagtatgtactatattaccatgttttctaatattatctccatcttataccctcaggttcattagtatctacacagagagtgcttcctaatgcattatctccctcttctattagaagtattgcccatcttttgtcttattttgtcatagatattttttcataaattttggttaatatataggagatagttgacttcaaaaaattcaatttcaggttttactcatactttgagactcaaagtatacttttttgttacaaatgttgtaaattatgttcttagtttcatgaactgtctgctcctaatcatttgatgtaattctgcacacaatcaaagccacttatgaaattttgtgagaggtactaaatgctctactgaaaagtttttggcattaaatgttttaaaagaaataaaaaatggtaacatttttcccaaatatgttagcaaattcaagaagcagattgtactaattacaattactgcgaagttacatatgcatcatgaactcaaatttctcttaatgaggcttaatgtagcttaacactttacctcatgggagttacaataatggaaagaacacataaaaaaattgagttgattgttctatatcacagcagggcctgtaaaatgtgccaggtctcccaaggtggccatactctttgataaattcacctatgagctgctgttatatttgagggaggctcatgaactaccatctgcagaaaagggaaaggcacatgaggactgcgtgtatttcctatgcacagagtcaagctcactactgggaaaaaaaaaaactgtcccatattcagcgagttctgagaaaccagctgaatgaatacagtgtggtcacatctcaacattaaaatacgcagaatcatccacactaggtagcacagtgaacggaaagatgagacaagatccaactaattgatatggtaaaactgcaatttgtgataggagacaaatttctgttaaaattgtcatgcaaaataactaaatagtacactttgggagcttgatcattatttttacacctatttagcactcaccttgttttaggtaactatgcctggtagtatagagagctattaatgtttctattacctgatctcaaggaaattaaaaattaatgttaaaaatgcataatcatgaaaataaggtagcctgtatttctgctattattaagcctaccaataatagagttatcttctgggtaaaaagtccctgagacaatctcctagctaggtgtggaaactcccaggaagttgcactttttaggaacactgtctttggtcaccagacttcaccccaaagtaatcaatgcctgtaggtcttaaccgtaacactaaagtcctaattcagatacaaatgcattatatgaaaaagaagtgtgttatctgcttttagctaaaagtttaggatgacagtggtgtactctgccatgagctgcatcacagaaaagaggccccgatgatatttctccaggacaactaaggcaacaggacagcctccccatcactattagatactcaaatagtgagaatctgtaacactttgttcacctttcatccccactttaaaatagagaacagctagaggcttgtgatttattctcatgttagaagccctctcatatgacatattcaggataggtagttggccagtttgttaaatgaatatattaaagtcaagaatcttcagaaataatacctcaagtattctttataaatggcaacacttaaatgcacatagttggctactcttttgatgtagagccaaggcctttgctttgagtttgaatctcttagttagatttctacaatgtcttacatcaagaacatccattatgcatcatctatggcttacagtgtttctttgtaattgagaagttaaggcacttgagaagcaatctaagaatcattcacatttcctcccaatcttttatgattggctcacctacatctaattctacagtaatttttttagcaaatttactagcattctatttagttttcacataaacacttctctttacttatatgttacatcagtctacataataattatatgatataatataatagcaagtacaacagtcattaacagattttggattcctggcaaacatgcaccgccacaaaggggacctgaagtacaaaggtgtactaaagaatagctgtctagaatgtcatagacattggtgtgcagactttagagaggacatagtgtctgataaggcactctgctgaaaaatatgtagaataaggattcggctgttgcttattgagcttgtaactttgtgtaaagtcctgattatttagaaaagaacaaacaaaaaaaaaacctgcctaatgctccccattacaactagaaagtaaccttaatcaaaacacacagatataaataaaaaattacagggaagaaaaacaacgaatctgtttgggagttgaagaattaaaaaaatgaaatttcaaaaaaatcaaaggttagcagaggaagacttctaccctaagaagaaaagctatgtgtgaatataacactactaaagtgaaaataaagagatactaccttaccagcctcagctccctgctacaagttcacagagtgacgtggtgcccacaacttcccaaattcatcaaatatggattgcaataaaatgaccttgagaattcctttcaggtctatttgtacaaaccctggcatgtgagtggcagtttcaacgaaaacccagcagatcacatgagtgggtttgcatgtttataaaactgtttcaaatgcaatcaccagatttcaagatttgaaaagcattctaaaatgtttcagagtgcacaaggaaaggggaaaggaacatttcagtgcctctgagcaaatacagagctttaagaaaatagctggtatcaatgaagacattttgattggacaacttcaggcaaacaggacgcccgtttaacactacacgttctctttaccgtcaccatgaattcaggcatagctatcctcagtctgtcacaacaacccgggaaacatgataattcttataagtgccacaaaaaactgtttaagaaatagcagaatttgtctgtttccttagtgagagagaagattgatacataccctggcagaagctgtaaagtaataccattcccatgaaatacaacaagccattgtagatacttaagtaatattgtctaaagaaaaacaacattcttaaagaccatttttgacaacaatgaaaccaagtcagggccacttttttcttacatttgatctccgtagatatttgtactctaaagatagacagacatttgtttacatagaataaaacatcataaattgccaactagagtaagatgtgtgtcagaatagctgcaaatgacacttctgcaaaaaccacagataatatgatgtggccgctaagagattcatcactggttatttttgaaactccagcccattacaccgactaccattatagctatttaagcatgaaatgtttgccttcatttttattcatatgttttatggaccatttactgttagctagaaaatcgtttaaaaggtaattcagtttacagctgaggaaaaataagaagcctccgaaacaatctcagaatattgacttactgtcagataggtaggaatgaacttaaattcaatgtgaaattggggtgaaaggtgactttctaacaagtaactttaaaagaaataaatgagtagcttgctaatgtttctctttttgtttcccccttaatggaaaatatcttagccacaaagggatgagaacttcctgcaaagttttcattgttcaaaaataacatcaagtatgaaaggtatggcttcaacacagtattaactactgttggcctctgccacacaacacactgtaaagactttgaaagactagatgaagaataggacaaccatgccttctatgagatatattttatttcccagtaaaagcaaaatttaattatattccgaaagtctttaatccttactgtgtgtccaaggcactactctagacagcacagacggatacaaaaatggtaaaacctagcttgtggcctccatgaacttaaggtctagagggaagagaaatgcctgaataacttcagcacaaagcagtgtataaaacagcctacaaatatacaaaatgcaccttctgttggaaaatgcagctcccctagctgtcagatgggttgaggtgccatgaaaataaactccaccctcgtattgctgtgtaggagaggcgcccccttcaggccttagggcaccattgcttgcctcttgtaagtacgtgtttcctctactgcgggaaggctcttcaaagacaagaactaaaattcttatttaccctgtgtgccttgcacttagtttagtatcttgtatataggaagtaatcagcaaatgtagaatgaagaattaataaattccctcaatccagaatcctctgcctccttttctctacacgtgcctattcacatttctgaatgtaaaaatcctacccagctcaaatgccacttcttcctaatagcaatatccaaccttgcctcaaaatccccatccttggcagaaatagtttatactttccctgctttctctggactctttagtttatatccctaaaacttctaaaactttgaaatggctgaatctttaaatcaacagttgtcactagctctcatttgacacaatcccctaatattttatttgattattgctatttgtgtacatttgtttttatgtgtaagctccaagagggaggtacctgatgctaacatgccatttatgatgcctccagcattttaaaggagcatccatttgttggttcaacaagaacttctttagcatcaatattgtacctagagctaaataaaatattgatttaactaaatcatatttctagaagtgattgaaagattccaatgtaacaagggtcttcttaacctctgcagacttttgtctgttctaacagtgtgctgtgtttgtgcaaggattatcatcacctagggctatcccgagactaactactccaagcatttttccccctcaaatctgcaagcattgtttccctcagattcatcttcttcttggataatgtcacagatgaaatataccgatgatcttacatcaaatacttacaggaggaggttaaatcattatttgccccatggtggtggtcagcttctagctgtgaccaccaaacctctgctacatatttatgagtcttcctaaacctctaatttaggtttctaaattcaaaatgcaaatgtcctctccacccccagaaaagtttgacatcttttcatttggtctttcccatctttacaaataacaaaataaaacaaaacaaaaatacaatgaagaatgcattaaatgcacagcttttagctcactgctgggcacataggaaagatgggactaaaaatagttaactagtgatatgtatgaaaaaaagttttttaactataaagaatattttgtgtaactggatattttatttcacagacaactctcatgtagtcagagacttcaaaatgcaacactcatacctggtattttatgtgctttcagtttgaggtttctcatttacaatgaatcatttatattttctctaaaagacataaagcatttttgttattttcaatcgcatcaaattgattttgttcttgacatgatgaccataattgcaacaagaacatcaatgatcacaatgggatatgagtatttcacttcagcacttcatattcaccaaatcatgccatgtgtgtaccttaaatttctgagaattcatttttcagaatcatcttatagattgctaattttcataataaactaaactgctgattcacctacaagaaaacacagaaggaacatgtataactatatttgagtcaacagctgctgtgcccactaaaatcttccccgtctcacattgagaacaccgtcactacgtttttgcagctaaaagaaggttgttctaaaagcagataatctgagaatcagtcatcttacattcatgtctttccccagagtggtttaaaggaaaatgcgttagaaaaatgtttataacatttaaatttgttagttgctggaaacactaagtctaatgtaggctgtttctagaactccttaaatatcacccccctcaaaaaaataacagaatgcaaagtccagtatgtctgatttaaatgtatctataggagctcaaaataagcatgacattttgccctaactggtaaaaagttctggagtaaattttagacaatttgggtgatcctataaatcatgataatctctcaccatctgtctcttctaatttcaccattcctaacttctgttctgtttctctcatcacagccccaaagtaaagagtctgttttgaaggttatcaactctttccccacccctgtagaggagacttccctactgctgaaatagcaataaaaaataacttgcctaccaattactgagatggttatagaatctccgattggaccatcctctggttaaatgtttaaagctcagttaaaatgcaaattaacagtagacaatgtagcaattatggcaagagtgggacaagagaaaaagtttcatccaagaatgcaaatttttgaaactataattaaatgtgcaatttgttctgttttatagagatttttatggcatggaaaggtaccaggaaaccccaactaaaatagtgccagattagtgtttctagtctggtcaaaaagaatcaccttagagacactgcaattttgacagcgcatcttttacctcatgtcactgaattgatttttcctaaattgttaaattgggtaggttaatgtaaaattccctgagttatttggagaaagatgaagtaatttatggatgaggatgaaactttctagatatgtcaagatatgattgctgcatcacagagaggttggtactcatatgtgtaagtaggaatagtgtctccactagtggcttgagtaaaatctatacatgcatacggaacatatgtggattccatctgaccagccattcatataacagttgccagtgtggggatgggttgagaagaggtgaaattagaacaataaaagatcaaaagtaataagaatataacagaaggcacaaagcactaaaggaggaatcatctgagaagtaaatgattataaatcataacagaatggagattgatttacattctgaagatctcaaggaaacaaaatgtataaggaacaaaaaaagaaattaatgtgtgataaaattaagaactgacacatctaataagaaatgactatagacgagcagagaattaatggtttgttcaaatggaataacccatacttgaaaaaacttatacattaatatgaaaaaatacatatagaataatacataggaggcagggagtggtggctcacacctgtaatccaagcactttaggaggccgaggtgggcagattgcttgagcttaggagtttgagaccagcctgggcaacatagtgaaatcccatttccactaaaaatacaaaaagttagctgtgcatggtggcgcacacctgtggtcccagctactcaggaggctgaggtgggagaatcacctgagcttggggaaatggaggctgcagtgagctgtgattgcaccactgcactgcagcctaggcaatcagagtgagaccctgtctcaaaaataaaaataataataacaaataggagagtatacagacatagataaagcaaaggcataatgatttttaaaaatactctttcccctagtgtatttgtaaccccccaaaaaagggtcacaagccaataatacaaatagacaaatagtaagtgctgtaacacaaagaaagagacctgaatattttctaaagaacgaaatgttctgcactgtctcgaaggaatgtgaggtagcatcaaaaattgttagaatcttttttctgggtttcctgtttatccaaagagcaacatctttaatgagcaatgacctggacactgattcaacatcttgacatggatacaaaccatcttgacattgccaacctccattacagactgataatattggttccaatcttggacattttcaggaaatgagaaaacaagctaaccatctgccttcctttagttgtagttttaaagcaaggatattccaaaaataaaagtcaactatatgctacagattaaatatcaaactatgaatgttatccgctatccaggtaataaaagtgtaagattccacttgcccatagggttctttgaacaaaataataaaaatgtcaaagaattcaatttaaaaaagaactccattgaagaaaattttacttttctaaattaaaaatcaagtatataattaaaagcttaatagctaaaagcaaaaaaaaacctattacaatataacgaacaaatataacgtttttagagaagagatgatgctaatcgttaagaaaatcctaaaaaccctaaaagacaaaggcctgaaaagacaggtttttaaatttcaaactcactagtaatccaaaagatacaaactaaaacaatgagattctatttataaaaaacaaaattaaaaaaaaaaccatgtaaggctagcaactgggcagtgagacaagcatacttgtatagaatacagtgggaatttctttttgaaaaataaattgggaaaagcctttgacctggtagtttcacttccgggaatctattctaagtaaataatccaaaatgtaaataaaaatgtttgcacacagatgttccctaataatttgtatgcaatatgggaaaatgaccaatacaataaaagaatggttaagtaaattaggatatataattcatataatacacataatagagacacattatacagactttttcgttacatagggaaacattcctgttaagtagaaaagtaggattcaacattctagatataacgtcagactctgtgtgtctgcatgtgtttgttcatgttcatacccacaagtgcatattgaaaactacattttgaaataactatctctatagacattatttttctgaatagaaaaacacattatttaaagaataaaatttttaccgttttccaataataccatgcagccaaaacaaaatatccttttggtctcactaagtatggtttacaataactgaggattatgagagaatccacagagggtctaggcatggctaagtaaagcctgtcttcactgtatacacactattcatttaaacaaagttgaaagccaaacatttcgagacatcaaataacacttaagacttagatccatttggtatgcgaaatacatattgttcttttgtacttagctctgccaagaatctttattgattaacttgtaaaccttaagagaaaatggtatacatctgaaacaatataaaacacacttcttgccaaagatcctacagtccttccaaacaagtctaattctactgaatgctttaattaattctatcaaacattcataacttttgcagtgaagagttatgaaggctatttcttccaattctagagtttgcagatttaataacaaaaagtatatgtaaaatattttattcttaaaatgtagatgtgtttctaattagacgaacaggtcctctcccccttccccaacaaaagatattgcagagactggtactgtcaacgaattgagtaataccatttattaataccagtaaaaacaaaaacttcaattactctcaattctaagactagtttccataatcatgttgttgttggaacatatgactaattttgaactatctcctctctattatgacatggtccaaaatggtaacaggtccttgtttgatcatgtatattggagaactctaaagtttccttatgaaatatttattttcaagagtgtaaattccccccttttttttttgagacagtttcactctttcacccacgctagagtgaagtgttatgatctcggctcactgaaacctctgcccccccaagttcaagcaatcctcctgcctcaacctccccttatcagaaaaaaaaattgatgaactatttcataagccacccctgttgaagagtcattagaaggattcctgaacactgactaccaatttacttaaaatacttaaaaagatgtaacgcggccgggcactcatgcctgtaatcccagcattttgggaggcgatcacaaggtcaggagatcaagaccatcctggctaacacggtgaaaccccatctctactaaaaatacaaaaaattcgcctagcatggtggcacacgcctatagtcccagctactcgggaggctgaggcaggagaatcgcttgaacctgagaggcggaggttgcagtgagcagagacggcgccactgcactccagcctgggtaacagagcgagactctgtctcaaaacaaacaaacaaacaaaaaaaagatgtaacccacatccttatgatacagaacatttccatctccctagaaagttctctcatctctctggtcagtcttccctttcagaggctaacctttttccctttttctaacctaagttttgttctagaacttcctagaaatggaatcataccacatgtattcctttttgtctcgattccttgactcagcattttgtctgtgagagtcactcattttgttgcaggtatcagtagttcattcatttttgttgcggagtaatactccattgtataactgtgacaaaatttgtttattgattctcttttgattaatatgtgggtttatgaatatgtgggtttatgaatattttaacaagtatttatgtatgatataattttttatgtgtaacataaaatttgcttctgggtaaacaataggagtggaattgctaggtcaaagggtaggtgaaagtaacattttattatctgcaaaacatttttcaaagtagttacaacatttaattttcctatcaacaagtgtaagagttcagtggttctaactcctcaccagtatttggtgttttcaacctttttaattttgtcctttctagtggatgtgtggtggtatttctttgtggttgtaaatgcatttagctgaagcctaaagatgtggagcactctttactgtgttcattggccatttgtatatttacttttgtaaagtgtcccttgaaatgctttgcccatttttattgagctattttctttggtctttatcttattaatgtagatgtgctttatgtgatattgattaaagtcctttgtcagatatgttttacaaatatttttgtcctgttagtggctctcttactcatttacgtatgtcttttgatgagcagtctaatttaccaattttgagggttataattttctgaatcctgtcatgttctgttcttgaagtatcagagttttacctttgcttttaggtctccaatccatcttgaattgatttttgtctgaggtgtgaatttagggagtgaaaatttatttttttcccatatggatatcaatttattccaatttcatttataaataagcctctccattcctttatttaattgctttggtgtcttgaaaaaaatcaatttactttataaatgtgtgtctatttctggactcttttatttccttcatttatttgtctatccttatgtcaaaacctcataatctttaatacaactgtatttttacagttataatacaactatattttatagagtcaggtagaattgctgttgtttttcaagattattctgactattctaccttctttactctcccatataaattttagaataagcttgtcaattcctataaaataaaagccattgtgatgaagattaagataaatttgaatatatagattaattcaggaaaaattaatatcctaaattgttattgagtcttctgatcaatgagcaaagtatatctctccatttattgaagtcttcttaaatttatcttggtaaattatagttttcagtataagaattgtgcacatatttcattaaatttgctactaagtattttctattttctggcattataagaaatgaaatgtttaaatatttagttttaattgtccattgtatttataaacatgattaaatttgtattgactgagatactgagacctttctaaactcacttattggttcaagtcccctttatggaagctattccttatggttatttaagtatctgtttatgtcatacgtgaataaaagctgctttacttcttgctttgcaaattgtatgagttttaattattcttcttgcactgttgctaagaccttcagtaaaatgttgaatagagatttgagaacagtcattactaccttgttcccaatcttatgggaaaagcagtctttcatctttaattatgatgtgagctgttgggcttttatgtagatggcttttatcaaatattcctacagatgactccttgctgggatgggaggaggtgctgtcccgtgcactgcaggatgtttagcagcaaccctggcttctaccaactagatggcagtagcacccttcctctagctgtgacaatgtctccagacgttgcctaatgtccctatggtcaaagttgcccccagttgagaaccactgagctaaactgaggcagcaagtcaggcacaaacacaggagattacagctaacatcatcaggcagctgcctgaatggggacttgagttttctgagctgcagactgacttgcttggttcacctatgtctttagatccccttgcctattaaaaggctgtcttagtccacctgggctgccataaacaaaatgccacaaacacaatggcttataaacaacagtaatttatttctcacattctgtagactgggaagtccaagatcaaggaaccagagaatttgatgtctaataagggccagcttcatcatagatggcaccttctcacggtgtcctcacatggtggaagagttaacggagatccctagggcctcttttataagagcaccagtcctattcatgaggatcacctaaacaccccctagaggcctcaactcctaatacaatcaccttggaggtgaggacttcaacatatgaattttggagggacacaaacattcagaccataggagaggttctgacccattcttctgggtacaatgcttacataaaataggaacattcagactcaggaccctgaagatactgcaatagcaccctggggaggaagtattcttgggcctctaggctttccatagatgtcagagatggcacagaatgacagcagcctagtcttcatctcctttatttgttttttcctgcacaattagagaaaatgtcttgaggtaccttcttacctccaatgcagctattattcaaaaaaaaatgactgggtaagcctccttttaagaagagccatatttttacacacatacgtatccacacacactttctttctaataagtaccataagtgctttccagttgtaataaaagttgacaaagttggcgtatttaaattgtacaatgagtcaatgttttccaatctccttccctcatgctattgcaaaagacacatgcacgtatatgtttattgcagcacttttcacaacagcaaagatttagaaccaacccaaatgcccatcaatattagactggataaagaaaatgtggcacatataccatggaatactacgccaccataaaaaagaatgagttcatgtcctttgcagggacatggatgaagctggaaaccatcattctcagcaaactaatacaggaacagaaaaccaaacaccacatgttctcactcataagtgggagttgaacagtgagaacatatgggcacagggaggggaacatcacacaccagggcctgtcgggaggtggggggcaaggggagggatggcattaggagaaatacctaatgtagatgatgggttgatgggtgcagcaaaccaccatggcacatgtatacctatgtaacaagcctgcacgttctgcccatgtatcccagaacttaaagtataatttataaaaaaaggtttgagtatttatacattgaatgaaatttgaatattggaaaaatgtacctgcttctctttttcaaatatttttggtattaataagattcaaaataatttaaaagcaacttttctcatcaagtattttcaaaattcatagatactaaaccttacccttcttgggtagggtttgccaagttttgtgacattagaacaggctggtaacaaggagcctaggcaaaaacagaaatataaagtaatgaaagctacaaatatggagaaatattaatcactggataattttctaagatccactatgaatagaactgattaataacagaagggagaaaatactctgaaatttaaagggtttgaagaaataagcatttacatggaattcaatatatcgagaagtatgttatggttaccaaacatgctataaatctggacatcatctcaatttcatcaccaaaacatttttaactcaatcttctgggagaaatttctttcatttcattttattatacattctatccaattgtataatcaaaacacagttccaattactgaaatacactttataataaaattgctggtattatcctataaccaaaggttagtaggttgacctccaaataaaaaggcaaagtgttttgattcataaatgagaatttctattcccagccacttatacaggaagtgccaataagatttcattgtggaaatgttaacacaatataacttctttgcatgcttaatttagcacagccaaagaagaaacatcttcaagatgttccaagtgtggggcccactccaattgtagaagactcatgtttatggatgtgattaacaaactgccagtgcattcagctgtggcgtagaatttttagctacttcaaatgtgcattcaaaataatgtatttctcaattatcaaattctttttgtactttcagataatccctctacttgagcaaaaactatgaattcatcatttggctgtggtttacatatagtttgatgattcttttctatcttaccttaaatcaacaagcatctaccagaaaaataaaaaaaaaaaagattacaggaaaaaattccaattaacttatcaggtacagaaaatttatttgcattaagcatgttatttttcctcaatctctcctgtttatgactaactgcataccattcaactaacataaaagtgtttactaaaagatcagagaagttatccaccttcatagccatttggaagagaaaaaaaatctttctactctttccaaaatgggttataaacacatccctagagaaatttcaaatgaatgtattcctctgcaatttgattctgcaaaaaaatgtatgcaactgaaaattacacacagagaatatttaagtcatgactatggaaaaacaattactatatttggatacacaaattaggcaactaattatttcaaaaatgcaatcatgcacacaaatagatattcactaatttccctcccactctaatcccttaacttccttctgtgtttttcacatcaattttagctctcctatcatttttttctctactaagaacgatttgtgaaatggttttttatcttccactaatatgtgcaattcaattatgttttcctgtcaatgtatccatcaatgaggatgattaacatccattatctgacccttcattttctatacgacctttgcaaatcagtggcataaaagaaattcttgttctttggtttgtgtcagcaataacaacaagagaaacataccaaatataagacattagaaatatatcacagtaaattcaaacacagtgcgattctgttatatttcaacagtcaccacggaactttgaagtctctgtttcacttattcttttgagggattcttatctcaaaaaaaaggaagaaaggaaacaattgaaagttcatactttaatattaactactggattgtgtcttcattccaagtggagtcggaaatttaaaaatcaaataattagcacacaagctctaaataaaagtaaaattaggttttttttcaaccttctgataggaattttaggttcaaaatagcttctggctaaaatcatgtaatgctgctgtgaccaacttgtcactaaaaccattgaagacagcctttaaaaccaaaagtaatggataatcaattccataatcttaagagaaaaataggttctaactttgaaaccgtaaagggaatttagttattccttggcatacccagctttcacttccaattgactggctcataggtatagaaaactaagaacatatccttcttttgttttttccttcaacttttaagttcaagggtacatgtgcaggatgtgcaggtttgttacacaggtaaacatgtgccatggtggttgctgcacagatcatcccaccacctaggtattaagcccagtatacattacctattattcctgatactctccctctccacaagccaccccacccccacaggccccagtgtgtgttgttcccccatgtgcccatgtgttctcatcatacagctcccacttataagtaagaacctgtggtgtttggttttccgttcctgcattagtttgctgaggacagtggcttccaactccaaccatgtccctgcaaaggacatgaactcatccttttttatggctgcatagcattccatggtgtatatgttccatattttctttatccagtctatcattggtgggcatttaagttgattccatgtctttgcttttgtaaatagtgctgtgatgaacatacacatgtatgtatctttataatagaatgatttatattcctttgggtatatagccagtaatgggatctggctcaaatggtatttctgcctcaaggtctttgaggaatcgccacactgtctcccaaaacagttgaaccaatttacactcccaccaacagtgtaaaagcattcctttttctctacaactttaccagtatctgttgttttttttattcttaatcacagctgtcctgactggtgtgagatagtatctcattgtggttttgatttgcatttctctaatgacgtgatgctgagctttttttcagatgcttgttggctgcatgaatgttttcttttgcaaagtgtctgttcatgtcatttgcccactttttaattgggccattggtttatttcttgtaaatgtgtttaagttccttgtagactctggatactagacttttgtcagatggacagattgcaaaaattttctcccattctgtaagctgtctgttcactctgatgatagtttttttttgctgtgcaggggctctttagtttaattagatcccatttgtcaatttctgcttttgttgcaattgcttttggcattttcatcatgaaatctttgcctgtacctatgtcctgaatggtaatgcctagattttcttctagggtttttatggttttgggttttacatttaagtttttaattcatcttgagttaatttttgtatatggtgtaaggaaggggccgaatttcaattttctgcatatggctagcccgttctcccaccaccatttattaagtatggaatgctttccccattgcttgtttctgttagatttgtcaaagatcagatgttggaggtgtgtggtattatttctgagttctctattctcttccattgggctatgtatctgttctttttttttttctttttctttttgagatggagtctcactctgttgcccaggctggagtgcagtggcacgatctcagctctgcaacctccacctcccaggttcaagcaattcttctggctcagcctcctgagtacctgggattacaggtgcatgccaccacacctggctaatttttgtatttttagtagacatggggtttctccatgttggtcagggtggtctcaaactcctgacctcatgatctgcctgcctaggcctcccaaaatgctggggttacaggcgtgagccaatgcgcccagccttctgtgtctgttcttataccaataccatgctgttttggctactgtagccttgtagtatattttgaagtcaggtagcatgatgcctccagctttactctttttgcttaggcttgtcttggcaatttgggctcttttttggttccatacgaattttaaaatagtttcttctaattctgtgaagaatgtcaatggtaatttaatgggaatagcatgaatatataaattactttaggcagcatgaccattttcacaatattgattcttcccatccatgagcatgaaatgttgttccattcgtgttatgtctgatttctttgagcattggtttgtagttctccttgaagaggtccttcacttcccttgctagctgtattcctaggtattttattctttctgtagtaattgtgaatgggagttcattcatgatttggctctctgcttgcctgctgttggtgtacaggaataccagcaacttttgcaaattgattttgtatcctgactgctgaagttgcttatcagattaagaagcttttgggctgaaactatctgttttctagatataggatcatatcatctgcaaacaaagataactggacttcctctcttcctatttgaataccctttatttctatctctcacctgattgccctggccagaacttccaatactatgttgaataggagtggtgagagagggcatccttgttttgtgcctattcagtatgatattggctgtagatttgtcatatatggctcttattattttgaggtatgttcattcaatatctagtttattgagagtttttaacatgagtggatgttgaactttatcaaaggccttttctgcatctattgagataatgatgtggtttttgtctttagttttttttataggatgaataatatttattgatttgcatatgttgatacaaccttgcatcccagagatgaagccaacttgatcatggtggataagctttttgatgtgctgctggatttgttttgtcagtattttattgaggacttttgcatcaatgatcatcaaggatattggcctgaagttttctttttttgttatatctctgccaggttttggtatcaggatgatgctggcctcatagaatgagttagggaggagtccctccttttttttggaatagtttcagcagaaatagtaccagctcttctttgtacctctggtagaattcagctgttaatccatctagtccagggctttttttggttagtaggttacttactactgtctcaatttcagaccttgttattgatctgttcagggattcaatttcttcctggttcagtctttggaaggtgtatgtgtccaggaatttacccattttttctagtttttccaatatatatacatagaggtgtttaaagtattctctgatggttatttgaatttctgtggagtcagtggtgatatcccccttatcatttctaattgtgtttatttgatccttctctcttttattcttttttagtctagctagcagtctcttttattaattattttcaaaacaccagctcctggatttgttgatattttgaaggatttttttgtgtctctatccccttcaattcaacactgatcttggttattcttgtcttctgctagcttagggttttgtttgctcttgattctctagttcctttagttgtgatgttagattgttaatttgaaatctttccagatttttgatgtgggaatttagtgctataaattttggttttttgttttgttttgttttgttttgtttagacagggtctcactctgtcacccaggctggagtgcagtggcacaatctcgctcactccaacctccgcctctcaggttcaagagattgtcctgcctcaggctcccaagtagctgggactacaggtgcgtgccacacacccagctactttttgtatttttagtagagacagggtttaaccatgttggccaggctggtctcaaactcctgagctcaaatgatccgctcacctaggcctccccaagtactgggattacaggcgtgagccaccgtgcccagcctaaatttccctcttaacaccgctttagctacggcccagagattctggtatgatgtctcttttttctcattagtttcaaagaacttcttgatttctaccttaatttcattatttacccaagagtcattcaggagcaggttgttcaattgccatgtaattgtgtggttatatctggatttcttttttttttttttttttgagacgggagtttccctctgtcgcccaggctggagtgcagtggcgcgatctcggctcactgcaagctccgcctcccgggttcacgccattctcctgcctcagcctcccgtgtagctgggactacaggcgcgcgccaccacgcccagataatttttgtatttttagtagagacggggtttcaccgtgttagccaggatggtctcgatctcctgacctcgtgatccgcccgtctcggcctcccaaagtgctgggattacaggcgtgagccaccgcgcccggcctctatgtctggatttcttaatcttgagttctgatttgattgtgctgtgatctgagagactgttatgatttcagttgttttgcatttgcgaggcgtgttttacttccggttatgtgattaattttgagtcagtgctgtatggcaatgaaaagaacgtatattctgttgtttttagtggagaatactgtagatatgtatcaggtctgcttgatccagagctgagttcaggttctgaatatctttgttaattttctgtctcaatgatctgtctaatattgtcagtgaggtgttaaaatcttctactattattgtgtgggagtctgtctctttgtaagtctctaagaatttgctttatgaatctgagtgctcccgtattggggtgcatatatatttaggatagttatctcttcttgttgaatcgaaccctttactattacgtaagaaaatatggaacgcttcaggaacttgcatgtaatccttgtgtgagggtcatgctaatcttctctgtgttgttccaagtttagtatatgttctgccaaagcaaacactccttcttttctttattggataaaagggacccagagttcttggtttggggaattttacttggaggcaaatgctctttctcccaccattccagcgtatttaagaaaaaaaaagtgagcagaaagtaggggagagaggcccgtaaagccacatgttccaaaaggcttagtctgcagaggtagagcctttggttgatgaaatggagagagaagggccgggcgcggtggctcacgcctgtaatcccagcactttgggaggccgaggcgggtggatcatgaggtcaggagatcgagaccatcctggttaacaaggtgaaaccccgtctctactaaaaatacaaaaaattagccgggcgcggtggcgggcgcctgtagtcccagctactcgggaggctgaggcaggagaatggcgtgaacccgggaagcggagcttgcagtgagccgagattgcgccactgcagtccgcagtccggcctgggcgacagagcgagactccgtctcaaaaaaaaaaaaaaaaaaaaaaagaaatggagagagaaaaggtgaacagagcacagaggagcaatcctgataggttgagaattacagataccgtgtataacttcttatagtatcaaagaatcaggctgcagaagctgaatgatcaaaagccaactgagaggagatactttaaataaaaattaacagaaaatggtaattgaaatggcaactaaacccaacaatattcattaaactgtaaactggatattaagttttcaacaccattgtaatagaaaaagagctggaccaaaaaaacccactcaacttgggtatctttgtggctttacttaaaattgagtaatatatatatatatatttgattctctagttattttagttttgagctatacacacacacacacacacacacacacacacacaacacacaacaggggaaagagaatagtgctccaaaaattcagaacaaacctctgaaaaatttttactgcagaatccaaaagaaaaactcagaagactacttggtgtccttaataaagaaccaataaattggcctttatgaaaagaaaacaggatgaaatgaagaggattccaggtaggttaaacaaggcaatggacagtgggtaaaatgaaaagggagagagaatttttttaaaggaagattacatagaaattaaaagcaaagtagaagaattaattgatactgaagaaagacagtgggcttaagcattatttaacagttctataagccttcacagggagaaaggaaaataaaagtacaatagagaagaagaaagaattgaaaaacagagactagggagctaacatatagctcatcagtattcctagaggagagtccagagaaataaaacagaaacaataaccaaatacacatcccaagaaaactttcctgatctcaggaaaatgggtgacatggctccaggaaaaaaataaatcagtaaaagacctaaaccttaacatatctggcactttttaaactactgagtaaacagaaaaaaaaatcctgcaagattccaggaagaaataaaacttcttacttaaaaaaaaaaaaaactctagcttcaaataaaatatagactctaagaaaatgttgtagcccataagacactacatattacaatgtgtgtgtataaatatatatacatgtgtgtatacacacacatacacacacacacatagttataactgtaagaagaaactaacagaaatacagtactaaagtctaacaaaactctcttaaagagaaaaagtagctggaaaattaaaaggtccataaagcatatgagtaaattcaattaatgaagttggtctaacagttacatttaaaagtttggattcttcaaatcaagaaaatacttttgtaaaaagttgatcaaaaattgttcatatattagatagaggcagatgaaagctataaaacatagaaattatataaaccacaagaatgcataagtatgtgaaagacgtacacataatccagtggaattaatatcataagataacctttaaaaataaaaacgcaaaggtaaaccttaacataaaacatttctaaatggcataggctaaagaataaatccaaattgtaattacaaactattttaaagttaagaacaactgaaaaatctatataaaatctaatgatgtgtggtaaaggatggactcaaaaggaaaaaaacacatggcattcagggttctcatcattttaaaaattgaataaaataaaataacaaaatattcaactcaataaactggagaagttcaataaaggtcaacaaaataacctgaagaaaagtcacaggaacgaatcaataaaaaacaaaacagaatgacatattcatttaatgacctagaaaaagatcaggaccccaaggaaggctggaaaaatgagttaataaaaatcaaagcagaaaaacggcaattaagtaagtagaactctgcaagagtaagacaagaaaatttagatttccttaaaaattacaaagtatatttcaccaaatatagaaacaagattaaaaatatacaaaagaataccatatacaatcctattctgattaacgtgacagactaatgcagtggcaataatgtaagaaaacatgaagtgatgaaactgatccagaaagaaatcgaaaccggaacataggaaaacaaatatatagcagaaacaaaagaaaaagacttttagaaaagtcgatctaaaccaaaaaagcaaaacaaaaattgtataagaagtaagttatttcagaattacactatattccacaacatagataaacaatggaagcctattgtattcattatattacgttgttgcaaaactatttgtggtttttgccattaaaagtaatgtaatagctaatagctattacaaacctaataccatacctgacaatgattatttttgaaaagatacacctatctcactttttaaaaatgcaaacataactaattaaatatataaataaagttcaggaatatattaaaagaaaaaaattcacaacaagagttgtaaatactttaaacaacgacacagaaacagaagcattattttccatggtaattctttttcttaaaagataaaaggagaaagatacaatgggagttatgtcattctagatcttaaagtgtattagaaacctgtaacaatgaaaatattatgacactagctctagacaagaaagacaaatgactaaaagaggtttgatgccaaagacaccaaaatatgtctagtgtaagattttagtataagtaaatgtgacatatcaactcactgaagaagctatagactaatcaagaaaggctattaagaaaattgacttgtacatgccagcaaattctcaggtcacaagaagaaaggcaaaaccccagaggttagcctctaaattcagccagacaaaccatctgaaagtgaaatggcccatagaacacgccaatggaactgtgaaattgcctcaactctgtctgcatttactagtcagccctttcttccccaacctttatttatcactgttccgaagtcacactagattagcaaaggaaatattaggttggtgcaaaagtaattgctgtttttgctatgaaaagtaatggcaaataagaacaatgtccccacaaattatgcccttaaaattaaccaaaatattaaagcatagagagtgacagcctatagtttgcaaccagcctggccaacatggtgaaaccctgtctttactaaaaatacaaaaattagtggggcatggtggtggacacctgtaatccaagctactcggaaggctgaggcaggagaatcacttgaatccaggaggctatggttgcagtgagccgagatagcaccattgctctccagcctgggcaacaagagcaaaactccatcaaaacaaaacaaaacaaaacaaaaagaagtcattttgttcacaggccattacttatttccatgacaatttaaaaatggagatgtttctattctatttatacagaagagcagcagtatatagtctcataaaatgccattgagaaaaaagagaatacaaattctgtctcaacatatgggaaatattttcataacttaaagcctagtaattttcaaattctattatgtttgactttccagctaaccttctctttttcaatgtgttctatagtataatcttttgcaaaactgaatttaaattaattttattttgaaaattttccaacatcccttgttgaattctgaggtaccaaatagccaagattggaggtttccaaactagtctgacccacccacttgtgggtctgtttctaacgttgctgtagacatttaaggattgtccaattttaaaaaccaataataacaaatctttggtaattggtggcaaaactaatgctactataagattatcagcccatcagtaaaaagtagagccagaaaccccacgaaggcttgtgtttctaaatgttgccacataaggcaaaatttgatcaaagtgcactttaggatgctctccaaagaatgttccactctaacacagcatggtttataattacagtattatgggaaaagccaaagaagaaaattgcatctgtagttttcacaaccagtttttctctgggttccaagataattcagatggcaaaacaaatgccccaagactgagctgagggattcgaatttgaaaatcctccctggctcccaatcttttttccagataacaaacttgccccccgcccaccaccatttcccccagatatcctactctgcctctcagtgatttagtgataaactcttctccgaaaaatataaattggcagattacaaccaagtagaataggtatttatgttgcctctatgtttgccttcatatatattataaacatattgagctctaaaagtacatggctttctgcctggatactcactgtttagtttactctgagttcttggtgggaaactgttaatattacttaaatattgtgatgggtgagtctgtcaagaaaaagtctctaatactcaaatcaataaatgtcatttatgtgcatagcatctgcctctgaaagacagtctggggacagggagaaacatgagggaggagggggaggggaggagctgcaacaggaagctaaatttaaattcagattacaatgaattctgtttcctacaacttccattctcaaaagcagccacatttatagaaaaagagaagtataatggtcactgttcacaatgagcctaaccataaacaactggacaaactaaaactatggaaaccagtggatcctgaaactttgacattaaaaactcaatttagaaaaattatatatatttgaaataggtaatcctattagtagactagatagagagatggacacttaggctttttcccttcttctaggaattcagaaactaaatcattttcaaccagttctcttctctgataagaacattcactccctcagggttataatatttcttaacagagaacactgaaagcacaactgttgaaagaaaagaacaggaaaaaacgactcatttttttctctcctcactggatctacagatgaaaacatcaggaatggggccatagggatatgctgaaatggcacaacatcaatgccatattagcagcaggtgataaattttagtttcttatagcaatgctaatttgcttatatatcatgtaataatttggactactggccaaattattaagcataagacctagatactatgtaagacatgtggactagttaacatcacaataaaaagattttaatacagaaatccttggtgttttatttaaatccataatctaatatataagtaacatcatttgagtgcacttattctccttgacttcactttggagttttgatggaaatgaattgatttgtgagtgtgagtaccctttttcctcttggagaagtaggaaagaatagctagcaccttaccactagtgcttcccacagctgccatactgaagtggcatcctggagacccttttccttcttcaaattctctttttttaaaaatgcaaagtccccaatcttggccctctctttgacctgatagttatgaaatcaatgaaaacaataatcccactttaccagcattttaaaaaatcacatatacagtattacgttctacagtgagcatctcattttgagaagaacaataaaaatcaagaatgtttgctttatgatggccaggatagtagagggtttgggaacaaaaataaatatatgaataatagttgatagaactaacagtgtctcacttggagaagggaaggtttaaaaaatgaatgaggaggagaggaactgaagtttattctgcaaagttccagtgggtgtgtagcagagactggttaaatgctcaaaaaagcctcactttccttccaggaacacaggtaaagtatttttcagccaccctagcagaaaagtggggttgtgtgattgacttctggccaacagaatagggttctaacagataccgacattataacctcccatgtgcatctgcacatgctcctgagaaatggattagtagtagtcagcaaatccaaccttcgctcttgctctacttctgacacacttcttcctgaatcttcctttatggaatatttctgtagtctctactttctcttactctctgagcctttgctcacctctttaaacatctttttatgccttttgtacaagtatgttccctttctagccaaacaagaaattctgcaagtgggggataatcattccatgtgctctcctgtgttcccaccagcatacctcgtaacattccccatacataggaaatatgaaggttcacacttaggcaatttttattagctaatctgagtccaactcattaaaataagtcttttttttttttttttgaggtggagttttgctcttgttgcccaggctggcatgcaatgaagcgatctcagctcaccacagtcttcacctcccaggttcaagcaattctcctgcctcagcctccccagggccgggattacaggcatgtgccaccacgcctggctaattttgtatttttgtatttcgtagagacggggtttctccatgttggtcagtctggtctcgaactcccaacctcaggtgatccgcccgccttggcctcccaaagtgctgggattacaggcgtgagccaccgcgcccggctggcaagtcaccttcaaaggaaattccatcaggctaacagcaggcctttcagcagaaaccctacaagccagacgaggccagaggcctatattcaacattcttaaagaaaagaaattccaaccaagaatttcatatctggctaaattaagtttcataaacaaaggagaagtataatcttttcagggaagcaaatgctaagggaattcattaccaccagacctgcattacaagaagtccataaggaagtaccaaatatgaaaagaaaagaacattacccaccaccatgaaaacacacttaagtacatagatcactgatactataaagcaactccacaatcaagtctgcataataaccagctaacaacatgatgacagaatcaactccacacatgtcaatgttaaccttgagtgtaaatgggctaaatgtcccaattaaaagacacagagtggcaagttgaatgaagaaacaagacctaactgtatgctatcttcaagagacccatctcacatgcagtgacactcataggctcaaagtaaaggaatgaagaaaattataccaagcaaggcatgggtttgtattataatttcagacaaaattgactgtaaactgacaatgatcaaaaagacaagggcattacataatggtaaagggttcaattcaacatgaagacctaactatcctaaatatatatgcacccaacacaggagcacccagattcataaaacaagttcttagagacctacaaagagatttagataaccacataataatagtgggagacttcaacaccctattcacagtatcagatggatcactgaggcagaaaactaacatagatatattcgagacctgaacttaacacttcacctaattggcctaacagacatctacagaactctccaaccaaaaataacagaatatacattattctcatctgcacatggtacatactctagaatcaaccacacaatgtgtcataaaacaattcttagcaagttcaaaaaaacggaaatcataccaaccacactttcagaccacagcttaatgaaaatagaaatcagtagtattagtttattctcacacagctatgaagaaatatctgagactgggtaatttataaaggaagaaagtttcattgactcacagttctgcactcctaggaggcctcaggaaacttacaatcatggcagaaagcaaaggaaaggcaggcaccttcttcacaaggcggcaggatggagtgagtgcaagcaggagaaatgccagatgcttataaaaccatcagatctcatgagaactcactatcacaagaaccacatgggggaaaccacctccatgatccaataacctccacctggtcccacccttgacgtggggattatgacaattacaactcaaggcaagatttgggtgggaacacagagccaaaccatttcatcagtactaaggaaatcacccaaaaccatacaattacatgaaaaataagcaacctgctcctgaatgacttttgggtaaacattgaaattaaggcagaaatcaagaaattatttgaaatgaatgagaacaaagatacaagataccagaatctctatcttatcaatattaaagcagtgttaagaggaaagtttatagtgctaaatgctcacatcaaaaagttaggaagattttaatttaacaacataacatcacacctagaggaaacagaaaaagagcaaaccaacccaaaagctagcagaggaaaggaaataaccaaaatcagaacagaattgaatgaaattgaaatgcaaaacaaaaaaaattgaaagatcaatgaatccaggagttggttttttgaaagaataaataaaattgatacaccactagctagacaaacaaagaaaaaaaaagagagatgatccaaataaacaaaatcagaaatggtaaaggggatattaccatcgacccaacagaaatacaaaaaaccctcagagactataatgaacacctttatgcatacaaactagaaaacctagaatttttcagggtaaattcctggaaacatacaacctcccaagattgaactaggaagaaattcaaatcctgaacagaccaatgacaagttctgaagctgaatcagtaataaaacacctaccaaccagaaaaagcccaggactagaaagattcacaggcatattctaccagacatacaaagagctgactggtacaattctatctgaaactattcaaaaaaactgactaggagggactcctccctaactcattttatgaggccagcatcattctgataccaaaacctggaagaaacagaagaaggaaagaaaacatcaggccaatatccttgatgagcataggtggaaaaatcctcaacaaaatactagcaaactatgtcctggatcgaacaggacatcaaaaagctaattcagcatgattaagtagactttatccctgggatacaaagttagttcaacatacacaaatcaacaaatgtgattcatcacataaacagaactaaaaacagaaactacatgatcaccttgatagatgaggaaaaagctttcaataaaattaagcatcacttcattttaaaaaccttcagcaaactaggcattaaaggaacaaacttcaaaataacaaccatctataacaaacccacagccaacatcatactgaataggtaaaagctagaagcattccccttgagagccagcacaagacaaggatgccaaatatcactactactctattcaacacaatactcgaactcctagccagaacaacaggcaagagaaaaaaataaaaggcatccaaataagaacagaggaagtcaaactatctgtatgcagacagtatgattttttttttttttgagatggagtcttgctctgtcacccaggctggaatgcagttgcacgatctcagctcactgcaacctccatctcctgagttcaagtaattctcctgtctcagcctcccgagtagctgggattacaggaacatgctgccatgcccaactgattttttgtattttagtagagacggggtttcaccatgttgcccaggctggtctcgaactcctgagatcaggcaattcacccaccttagcctcccaaagtgctgggattacaggagtgagccactgcacccggcggacagtatgattttattttattttttattattattatactttaagttttagggtacatgtgcacaacatgcaggttggttacatgtgtatacatgtgccatgttggtatgctgcatccattaactcatcatttaacattaggtatatctcctaatgctatccctcccccacacccccaccccacaacaggccccagtgtgtgatgtttcccttcctgtgtccatgtgttctcattgttcagttcccacctatgagtgacaacatgcggtgtttgggtttttgtctttgtgatagtttgctgagaatgatggtttccagcttcatccatgtccctacaaaggacatgaactcatcatttcttatggctgcatagaattccatggtgtatatgtgccacattttcttaatccagtctatcattgttggacatttggcttggttccaagtctttgctattgtgaatagtgcctcaataaacatacgtgtgcatgtgtctttatagcagcatgatttataatcctttgggtatatacccagtaagggaaggctgggtcaaaaggtatttctagttctagatccctgaggaatcaccacactgtcttccacaatggttgaaccagtttacaatcccaacaacagtgtaaaagtggtcctatttctccacatcctctccagcacctgttgtttcctgactttttcatgatcaccattctaactggtgtgagatggtatctcattgtggttttgatttgcatttctctgatggctagtgatgatgagcattttttcatgtgtcttttggctgcataaatgtcttcttttgagaaatgtctgttcatatccttcgcctatttgttgatggggttgtttgtttttttctagtaaatttgtttgagttcattgtagattctggatattagccctttgtcagatgagtagatggcaaaaattttctcccattctgtaggttgcctgttgactctgatggtagtttcttttgctgtgcagaagctctttagtttaactagatcccatttgtcaattttggcttttgttgccattgcttttggtgttttagacatgaagtccttgtccatgcctatgtcctgaatggtattgcctaggttttcttctggggtttttatggttttaggtctaacatttaagtctttaatccaccttgaattaattttagtataaggtgcaaggaagggatccagtttcagctttctacatatggctagccagttttcccagtgccatttattaaatagggaatcctttccccattccttgtttttgtcaggtttgtcaaagatcagatggttgtagatatgcagcattatttctgaggtctctgttctgttccattggtctatatctctgttttggtaccagtaccatgctgttttggtgactgtagccttgtagtatagtttgaagtcaggtagcgtgatgcttccagctttcttctgttggcttaggattgacttggcaatgtgggctcttttttggttccatatgaactttaaagtagttttttccaattctttgaagaaagtcattggtagcttgatggggatggcattgaatcgataaattaccttgggcagtatggccattttcatgatactgattcttcctacccatgattatggaatgttcttctatttgtttgtatcctcttttatttcattaagcagtggtttgtagttctccttgaagaggtccttcacgtcccttgtatgttggattcctagattttattctctttgaagcaattgtgaatgggagttcactcatgatttggctctctgtttgtctgttattggtgtataagaatgcttgtgatttttgcacattgattttgtatcctgagactttgctgaagttgcctatcagcttaaggagattttgggctgagacgatggggttttctagatatacaatcatgtcatctggaaacaaagacaatttgatttcctgttttcctaattgaataccctttatttctttctcctgcctgattgtcctggccagaacttctaacactatgttgagtaggagtggtgagagagggcatccctctgtcttgtgccagttttcaaagggaatgcttccagtttttgcccattcagtatgatattggctgtgggtttgtcatagatagctcttattattttgagatacgtcccatcaatacctaatttattgagagtttttagcatgaagggctgttgaattttgtcaaaggccttttctgcatctattgagataatcatatggtttttgtcattggttctgtttatatgctggattatgtttactgatttgcgtctgttgaaccagccttgcatcccagggatgaagcagacttgatcatggtggataagcttttgatgtgctgctggattcggtttgccaatattttattgaggatttttgcattgatgttcattagggatattggtctaaaattctctttttttgttgtgtctctgccaggctttggtatcagaatgatgctggcctcagaaaatgagttaggaaggattccctctttttctattgattggaacagtttcagaaggaatggtaccagctcctccttgtacctctggtagaattcagctgtgaatccatctggtcctggactttttttggttgataagctattaattattgcctcaatttcagagtctgtttttggtctattcagagattcaacttcttcctggtttagtcttgggagggtgtatttgtccaggacttgatccatttcttctagattttctagtttatttgcatagaggtgtttatagtattctctaacggtagtttgtatttctgtggaatcagtggtgatatcccttttattattttttattgcatctatttgattcttctctcttttcttctttattagtcttactagtggtctatcaattttgttgatcttttcaaaaaaccagctcttggattcattgattttttgaagggttttttgtgtctttatttccttcagttctgttctgatcttagttatttcttgccttctgctagcttttgaatgtgtttgctcttgcttctctagttcttttaattgtgatgttagggtgtccattttagatctttcctgctttctcttgtgggcatttagtgctataaattgccctctacacactgcattgaatgtatcccagagattctggtatgttgtgtctttgttctcattggtttcaaagaacatctttatttctgccttcatttcattatgtacccattagtcattcaggagcaggttgctcagtttccatgtagttgtgcagttttgagtgagtttcttaatcctgagttctgatttgattgcactgtggtctgaaagacagtttgttataatttctgttcttttacatttgctaaggagagctttacttccaaatatgtggtcaattttggaataagtgcggtgtggtactgagaagatgtatattctgtagatttggggtggagagttctgtagatgtctattaggtctgcttggtgcagagctgagttcaattcctggacatccttgttaactttctgtctcgttgatctgtctaatgttgacagtggggtgttaaagtctcccattattgtatgggcgtctaagtctctttctaggtctctaaggacttgctttatgaatctgggtactcctgtattaggtgcatatatatttaggatagttagctcttcctgttgaattgatccctttaccattatgtaatgggcttctttgtctcttttgatctttgttggtttaaagtctgttttatcagagactaggattgcaacccctgcctttttttgctttccatttgcttggtagatcttcctccatccctttattttgagcctatgtgtgtctctgcacgtgagatgggtttcctgaatatagcacactgatgggtcttgactctttatccagtttgccagtctgtgtcttttaattgaagcagttagcccatttacatttaaggttaatattgttatgtgtgaatttgatcctgtcattatgatgttagctggtgattttgcttgttagttgatgcagtttcttcctagccttgatggtctttacaatttggcatgtttttgcagtggctggtactggtttttcctttccatgtttagtgcttccttcaggagctcttttagggcagccctggtggtgacaaaatctctcagcatttgcttgtctgtaaaggattttatttctccttcacttatgaagcttagtttggctggatatgaaattctgggttgaaaattcttttctttaagaatgttgaatattggcccccactctcttctggcttgtagagtttctgccaagagatctgctgttagtctgatgggcttccctttgtgggtaacccgaccttcctctctggctgcccttaacattttttccttcatttcaactttggtgaatctgacaattatgtgtcttggagttgcacttcttgaggagtatctttgtagcattttctgtatttcctgaatttgaatgttggcctgccttgctaaattggggaagttctcctggataataccctgcagagtgttttccaacttgattccattctccccatcactttcaggtacaccaatcagacatagatttggtcttttcacatagtcccatacttcttggaggctttgtttgtttctgtttattcttttttctctaaacttctcttctcacttcatttcattcatttgatcttccatcactgataccctttcttccagttgatcaaatcggctactgaggcttgtgcattggtcacgtagttctcatgccttggttttcacctccatcaggtcctttaaggacttctctgcattggttattctagttagccattcgtcttatcgtttttcaaggtttttaacttctttgccatggcttcgaacttcctcctttagctcagagtagtttgattgtctgaagccttcttctctcaactcgtcaaagtcattctccatccagctttgttccgttgctgatgaggagctgcgttcctttggagaaggagaggtgctctgatttttagtttccagtttttctgctctgttttttccctatctttgtggttttatctacctttggtctttgatgatggtgacgtacacatgaggttttggtgtggatgtcctttctgtttgttagttttccttctaacagttaggaccctcagcttcaggtctgttggagtttgctggaggtccactccagaccctgtttccctgggtatcagcagcagaggctgcagaacagtggatattggtgagcagcaaatgttgctgcctgatcgttcctctggaagttttgtctaagaggagtacccagccgtgtgaggtgtcagtctgcccctactggggggtacctcccagttaggctactgggggtcagggacccagttgcggaggcagtctgtccgttctcagatctccagctgcgtgctgggagaaccactactctcttcaaagctgtcagacagggacatttaagtctgcagaggattctgctgccttttgtttggctatgccctgcccccagaggtgtagtctacagaggcaggcaggcctccttgagctgtagtgggctccacccagttcgagcttcccagccgctttgtttacctactcaagcctgggcaatggcgggagcccctcccccagccttgctgccgccttgcagtttgaactcagactgctgtgctggcaatgagcaaggctccgtgggcataggaccctctgagccatgcacgggatataatctcctggtgtgccatttgctaagactgttggaaaagtgcagtattacggtgggagtgacctgattttccggatgccgtctgtcacccctttctttgactaggaaagggaattccctgaccccttatgcttcctgggtgaggtgatgcctcgccctgctttggctcacactcggtgcactgcacccactgtcctgcacccactttccgacactccccagtgagatgaacctggtacctctgttggaaatgcagaaatcacccatcttctgcatcgctcacgctgggagctttagactggagctgttcctattcagccatcttggctccaccagtcagtatgattttatacctagaaaaccccatagtctctgcccaaaacctcctagatctgataaacaacttcagcaaagtttcagtatacaaaatcaatattcaaaaatcggtagcatttctatgcaccaataacatccaagctgagaaccaaatcaagaacacaatcctacaatagccacaaaataaataaaatacttaggaatacagctaaccagggaggtgaaaaatctctacaatgagaattacaaaacaatgctcaaagaaatcggaaataacacaatccaataaaaaaaattcaaccatcatgtgtaggaagaatcaatgttgttaaaacggtcatattgcccaaagcaatttacggattcaatgccattcctgtcaaactaccaatgacattttccaaaaaatttgaaaaacccattttaaaattcatatggaaccaaaaaagagcctgaatagctaaggtaatcctcagcaaatgaataaagctagaggcatcgtattatctgacttcaaactatacaagtcaacagtaaccaaaacagcatgatacaggtacaaaaacagacatatagaccaatggaacagactagagagcccagaaataataccacccacgtaaaatcatctgatctttgacaaagtcaacaaagacaagcaatggggaaaggattccctgttcaataaatggtgctaggataactaactagccaaatgcagattgatgctggacctcttttttatatcatatacaacaattaacccaagatgaattaaagccttaaatgtaaaacctaaaactatacaaatgctggaagataaccaacaaaataccattctggactttggtcttggcaaagatttcatgacaaagatgccaaaagcaattgcaacaaaaataaaacattgacaaatggtatctaattaaactaatgagcttttgcacagcaaaagaaactatcaatatactaaacagacaacctgcagaatgggagaaaatatttgcaaactatgcatctgacaaaggtctaatatccagcatctataaggaacttatacaaattaacaagcaaaaaacagccccatcacaaagtgagcaaaggacatgaacagacatttttcagaagaagacatacacacaaccaacaaatatgtaaaaatgttcaacatcagtaatcattaggccaatgcaaatcaaaaccacaataagatactatctcacaccagtcagaatggctatgattaaaaagtcaaaaaatactgtttttttttttaatttgctggcaaggttgcagataaaagggaacgcttacacactgcttgtgagaatgtaatttagttcagccattgtggaaagcagtttggtaatttctccgagaaattaagtcagaactaccatttaacccagcaaccccattattgggtttatacccaaaggaatataaataattctaccataaagacacatgtatgcatatgttcatcacagcactattcacaatagcaaagacatggactcaacctaaatgtccatcagtggtggactgcataaagaaaatgtgctatatatacaccatggaatactatgcagccataaaaaatgagatcatgtcctttgcagcaacatggttgaagctggaggccattatgctaagtgaacaaatgtaggaacagaaaaccaaatgctgcatgttctcacaagtgggagctaaacattgaatatatatggacacacatacacacacacacacacacacacacacacacacacacacacacacacacaaaaccctaacatatttcaaactttttcagctcttttcacacctttacctctctttcttgtcccctcaccttcagccaataatactgtctccaaccttacaggaagatataattcccagtaggtgaattctcttatctttctcataccaaccatgcaattaagggcacttccgcaaatccctttctgcttattccccttctcatgagctaacactacccgttacctattttctctctgaaatagctgtcagagccctgtcaattaagtctttaccaatggcttttaagcatactcaagtctcttccatcttatctagaaagtcttccccaaatcctacatgtcctgttcttctcttcttataagttttgtctctctgttctcattgcatccaattttccagtcctcactcactcttcactccagtctacctttttcctcataaaatagctttcgctaaagttgccaatgacttccatgtcaataactccaaagaactggtttaaacctgttatttgagcagcattttatattgctgaccatccgatctttatcaaaatatatcatcctttcatttttgtaactctacctatctttgtgatattcttccatctcctctgtaggttgatcttcgttcacatagatgtgagattaagttccttaaagcttggttccagactctcctttcttctcactcttttgtgtatctctaggcagtggcatctatggccatgatgtcatgtaccacctgtacacttatgatacacacgggtgtatctccagtgtggacctccactctaggctccagacacagacttaagtgtctacttgatgtttcttttctccctctcaaagtcaccctaaaccaaacatatccaaaattgaattcaaaatctgccttccaaatctgatctgcttccaatgtccctatcccagtaaatggtaccaccaactgtcagataaacttagtatcaaccttactcttttgttcccctggcttttgtttaatctatcactgatttcttcccttacctcccaactacatctgatacccctccacttccctccatccttataccacagctctagccaaagctctatcatatctggccttgtaacttcagcaattctctgctggtctttccccagcataccttggcttctcaccaatacttatgtgccaagctaaaaagagctgtctaaataacaaatatgactttgtcactcagttattttcagtgactttcctttgttcttgggattaaatatccttactaccaccccaaagccttgctttgtctggcctctggatgtctcttgggcttcaattagcatgattaccaccctccaccccccacccgcagcctctctctcctgaggtctctctggcattctttcagttctcggaatttcagtgccctgatctgctacagggttttgtctcctctgccccctgctcccattctttacctagttaatgcctatttacttctgagctattccctctgaggtaatatggccccaacaagaactaactctctcattaatttcctctggtagcaccatgtgtctgtctttgacggtgcttgtcagctccaattttctgtttatttctatgaacgtttgattaagtaaatgcctcactaaaaggtaaataagctctataagggcaggacctcatctgtttcctttaccactctatctccaagacttagcttagcacccaacatattgcaaacactcaaaagaatttttgttgggtgaatgaacaaatgaataaattgactatttactattttgttctcagggatgtgctgtctctaaaatagtctgaatttgaatattttcgagactgtaagagattgtttgtctaacattttatttttcacactgcacctaacatctgtccttataataaactaggagcatctctgttacaggaatcatgttcagtagttttttatccataggacccagcacagtgcctaaaagatgacaggtctcaaaaagtgtctcttgaaagaacagaactgtcaatcccaactcaaagatgctgtattgtataaagagaggctaactccaggcatggtactgtgcacctgtagtcccagctatcagggaggctgaggcgggagaatcacttgaacccaggaagcagaggttgcagtgagcaaagatggtgccactgcactccagcatggatgacagagcgagactccgtctcaaaacaaagacaaaaacaaaaataaagagaggctaactgtgtagactgtgaagttagctttctgaactcaaattctggttctgtcacatacatgaccagggacaaattacttagcttccttaagtctgtataaaatggaggtgataatacctacgcctcatatggttactgtgaacctcatatggtttcaccgtaggatttgtgagataatcctatgaaacaacagaaaacaaagtatagtcaactatagctctcagaaaaatatgatttctaaagagatcttattcagactagaaaactcaaagacatggtaacccaaaagctggaagatcctgtgcacaatgacatagaagaggaaaaaactaaaagaacatggtgaggctccccaggctataagttacagcatttcaaaaagaattgcattggggcagtcatggaactagagaatggatattatattctaagccttaaaaacaaaccaaaattctcaatcactttattcccactaagattcattacattgcctctattattccctaagctgatccctgaaccacctaagccaaatgagaactaaacaatagcttaatgactggtctgacaggttcttctgggacagaagaaaagcaattatagggggaaaataacctcaaccaacctcccacttatttaagcagcagttcagctatactgcttcttaaagatctaagatttgtgcctgattgtatatatccctacaggtaaaataatatgatctaatggtcccctgaaagtctgcatgaagaatttcagaaactttgtagatgtctttgatgattgatattgtccttaatggaaagcagaggcagtggccttcctttaataacaatccataagatttaagaaacggatgggtaactgtttaaaaaataaaaactgatctaagagaaactacatagaactttccctgactctcttgtactttattttttatttttttattttgagataattgtagattcacatgcagttataaaaaataatacaaaatcagtgtatcttttacccagttttcccccatggtaataatatcacaaccaatatattgacattgatatggtcaagatataaaacagttccattatcagcaggatctcccatgttgcccctctaatagccacacccagtttcctcctattccttcccttcttaatccctagcaactactaatctacactaatctgttttccatttcataattttgtcatttcaacaatgttatataatttgaatcatatagtatgcaacccttggggattggctttttccattcagcataattctctcaagattcatctagatcattgtatgtatcagtagtttgtttcttttattgctgagtagtattccgtggtgtagatgtaccacagtttgtttaatcattcacccactgaaggacatctgtgttgcttccagttttaggcgattataaataagactgctataaacacttacatacaggtttttctgtgaacacagaagtctttatttctctgggataaatgcccaggagtgcatttactggatagtgtagtacttacatgtttagttttttaagaaactgccaaactcttttccagagtgcctgtactattttacattcccattatccatgtatgagtggcccagtttctccacaaccttgcaagcatttgctcttgtcattactttttatttaaccattctgctaggtatctctgactctcctttaaaggtaaaagataagtataaggacttgcctaaaatcagggataacactagacactttaattcagcaacttaaattttgtcctgtgtttttcctaaaatatgatcagctaaattcagaaactttcactcttaggccatcagaaaattttaagaattaagtaaggatgaacaaccagtcgagtgacccaatttcacctgaaacattccatcaggtacataatgtttcttatgactttttatctcatttagaactactatttgttactgtgattctcttaagcaaatggttttgcccacacagagctattcgctcactgacacaggtttaactggttaaagaactcacagattgtttctcactattaacagatattatattgttttaccatcagttataccttacttctgcttctatctttagaactgcaggcttcggtcatttttaaagtcgttcaagtttagattgcattgacattaaatcaaattatagaggacaaacaactatgtattttcactgaggtagacacagtaaaaagttcccaggctttctctcctacttttagataggtctttttcagaagcttcctaactccctaagaagtctgagagttattacaatttctttatcccctgcttacatatcccatgccatagaaaaccgtttaatagaacctactgtagcagaggcaaaatttcacctctgctctcttagagtcccaggtagacctgataatgaaattgacataagatagattaataggagaaaagcacataacttttacatgacacaggagccctcataaggaaatgaagacccaaacaagtggccaaacctaaatgctgttatacttggttgaacaaagagaggcaattgtggaaaagtaactaaattacgtgtgaagactaaaggaagatcaataagaatattttaacaaggtctgtgtgtacaggattcttctggctatgactccttgtcaaagaatgtttcttttctcttggtagtaggagagcaactttcacatgtgagtttttatctcctgttttcagggggaagaaaaagaaaatgattagactgccctttttgcatctgctgttattcaagtgcccttagttcaaactaatccttataccaaaatggcatattctggggtgcatattctgccatccttcaatattaaataacagaacatatgcttacctatgtaccagctatttaatttctggtatatgccaaacagaaacgtgtatgtgcgagccaaaacaaatctacaaaaatgtttctaccagcattatttgtaatagtccaaatggaaaacagtccaagtttccatcaacagaagaatgcatacctaaactgccatatagcaaacatatagtgaaatattatacagcaatgaaaatgaaacagtagttttactgttacaggcaacaatatagatgagtatcgcaaacatttatgtggaagttacatggatatattcagtatatgaaaattcatcacactgagcaaatgatttttatgttttttctacatttctattaaacctaacataatagcttctacaaatataatttttaaaaacatgagtaaagaaaccaaaataagaattatgatcatgacaatgatgatgacagaatctttcctctgacctcagataattgtcaccagcctattttcacaaaagtacaaccctccttattgggcattagaattcagagtcctggttttaacaaactgttcatatggctggatatctagctctagtcactgggagactaaggcatttgacctccttccatacaatgactaaagggacacaatggggtgtggttggcagcacctaggtaagtaaataataatgttctggggaaaggagattttatgaagttttggtcacctttctgagaagagtccattcttctagctctccaagggaaaaagacaggatcccagttattatctcccaaatggcaatattatctgaccaatttttgaactttatacaaatggaatcaagtcattcagtatgtactcttttttaattgatttagtcaacattatgtttattatattcatctatattgttgcctatagcagtaaaactactgtttcattttcattgctgtataatatttcactatatatttgctatatggcagtttaggtatgcattcttctgttgatggaaacttggactgttttccatttggattattacaaataatgctggtataaagattttgtagatttttttgggctcatgcatatatgtttctgtttggcacataccagaaatgaaatagctagtacataggtaagcatatgttctgttatttagtagtgaagaatggcagaatatgtaccccagaatatgccattttggtataaggattagtttgaactaagggcacttgaataacagcagatgcaaaaagcgcaccctaatcttttcccttttttccctgaaaacaggagataaaatctcacatgtgaaagttgctgtctttctgccaggagaaaagaaacattctttgatggggagtcacaactaagagaattctgtacacacagaccttgttaaaataattcttattgatcttcctttagtcttcccacataatttagttactttttcacagtcgtctctctttgttcaaccaagtataaaagcatttaggtttggccacttgtttgggtcttcatttccttatgagggctcctgtgttatgtaaaacttacatgcttttatcctattaatgtggtttagtggtgtccccacccaaatctcatcttaaactgtagttcccataatccccatgtgtcatgagagggacccagtaggaggtcattgaatcatgggtggggggttacttccatgcagttcttataatggtgagtgagttctcatgagatctgatggttttacaaagggcacttcccctgcttcgctcagcacttctccttgctgccaccatgtaaagaaggacatgtttgcttccccttccaccatgattgtaggtttcctgagtcctcctcagaccttcagaactgtgagtcaattaaacctctttcctttatacattacccagtctcaggtatgtctttattagcagcatgagaatggactaatgtacctattaatctaccttatgtcaatttcaccatcagttctacctgggactctatgagagcagaggtaaagttctgcctctgctacaatagattctattaaatggttttctatgtgatgggatatgtaagcaaagggtaaagaaattgtaataactctcagacttcttagggagataggaagcttctgaaaaagacctatctaaaagtcggagagaaagcctgggaactctttactgtgcccactctcggtgaaaatatatagttgtttgtcctctatgatttgatttaatgtcaatgcaatctaaacttgaacgactttaaaaatgaccaaagcctgcagttgtaaagatagaagcagaaatgaggtataactgatggtaaaataacataatagccattaatggtgagaaacaacctgtgagttctttaaccagttaagcctgtgtcagtgagcaaacagctctgcgtgggcaaaaccatttgcttaagagaatcacagtaacaaatagttctaaatgagataaaaaaagtcactctgggagggtacacagtgactacactcttggtgagtctccaagcaggtagatacaattacagtatagaggaaaatgtaagatttttgtgaaaggaaactttgatctgataccttaatgctagaacttttttgaaaaagtagttaatgactcaattatgatggcagtccattgtcattctgtaaaaattcattaagtattctatgtaccaggcattgtgttagatgtgatgatataatggtaaacaagagagacacaaagcctgtgcgcaaatgagcctacagtttagcaaggaagacagacaaataagcccaaacaattaagtgtacaaatgggagcacatggggaaaataccaaatgagcctatagcaggaattagggaagtatgttccatggctttctgccaacagcagagaatggtcttggcatccatgataagtgggggtgagcggagggaaagaccaagccccaggacagcacactgaccattccaggagccagcatgggtggcccacacacatggaagaactacagcccagacaagcagggccgcaccaacagagggaccctgccaatcaactcctgagaaacaggcattctcacaacttcttgaatcaccttaatactcagagtttgtgccatttttaagtaagaaaagaaaaacattttggactacagaagcatatatggtgtttattaatattttctttgagcaaaagtttgttctgggacatttgagtccttgctagccagaacatttgcagcaatttactaaactgacaaatggagagataagcccaaaagctacatggccacagggagatcaacacatccatccagtacagatggatcaggagtgaactgtccctttcagtatatttgacatgaaattcctcacctacaccactgttgtattgtatataccattaatagtaaaggtgaataaatacataaataataaataactagtaaaggtgaataaatggtctgttttgttagttactcagcaaatatttattgcatgtcaccaagtgcaaggaccaggctaggttctggaaagaactgggaaattataaaagcaaagatactgatcacaggcagcataacaaggtagaaaaatacatgcactttagagctcaatcacctaaggtttaatctcagctcaacttcttaccaagtcagttgccttgggtctgttacttaactcccctgagcctcatttccctgtcccataatgtgacagtagaacactaccctgaagtgttctgcaggattaaatgaggtaacatatgcaacgcacctaagaaaagccctgcaccagaatttacttattcagaagaagctggcccccaggctctctcctacccctccttctcttcatgccaacttattctttcactgagatttgcaaacttatgtatggacgccatggtttctcattcattcacattccctgccccttggcctccctttgtgtggaacgcaaacttccccctgaaggatagacctgtgtcttggttttggactaccctggcaggaaattctagagtccagatacccagaccatggcttacatgggagggttaggggatatgattacttggacttacagaatgctcaccctgtggggaaggggaaggcaagaggagggtttaattaggatcctctgaaatgcagggctgggcagggaatattgttgctcaagtctaagggcagtatggtttagaagtaaattctatgggagtataagaattttaaggaatagtctttctaccagactatttcactgattgtgtttctacaacaatcatctttccttagctactctgcttcagtagctattttataggaatgctactcatgttcctgccttttcttgctttgaaactcactctgaatctctaacaagtccaaggtcttgaggtgcttgttcattgttctgtgcatctcactctagctgttggataaaagaaaatattacctaaaccgtattcactgtggttgctgttagtgtgtggatttaaataactcttccagctactattaaacatactttgtataatgacaacttagaggtggaaaaagttctagaaatttaagcctaagtccaaacattgaattttttttaaaatttaaatttaaagtttagattcagcgagtacatatgcaggtttgttacagggatacactgcatgatgctaaggtttgggcttctattgatcctgttgtccagatagtgaacatagtatccaaaaggaagttgtttagcccttgcccccctccctctctgttttcggagtccccagtatctattgtttccatctttatgtctgtgtgtgtccagttacttataagcagctaccactaataagtgaaaagatgggacatttggttttctgtttttcacattaattcatttatgataatgggttccagctgcatccatgctgctacaaaggacatgattttattgtttttatgtctgcatagtattccacactgcatatgtaccacagggaaatggaagttataaaattacaagaaaaaaatcaacagtatccaaattctaataaagattattagctatctttatagccacaaccacataattgaccaaaatatattcactcaaatttataacaacagaattattaatcactcaattcagtggccatatgtagctatggctatgagttatttatcactcagtggttatatatagatatggctatgagtcattttaaaaaaaagagccttctctctgtcaaggagacatgattcatcgaaaagtcagaagcagaagagtcaaaatccctaacagagaagtcaaagggtagaatatgctgagatcaggaattataattcatgctctgtgccaggataatccaggtatagcatcctgacatccaaggggcatatgcaaagcttggtgcaagctgcccaggccaaggctggctctaaggcagatgcaggaaggtcaaccagctggctggttaaaaggaaacgatgaccttcctctaggtctcttcattaccctgatatattctccttgttcagggataactagatccacttaactcttctcctacaaagattcattcatctcttctcctagttcaggtatgactcgctcccctcactgattcactccagggctcatctttaaaatacagatgcaaacaggctgaaatatccccaaggctaacagcttaaaatatattaaagatgaataagtgcacctggggcttcaaggactaatgccataaaactgtcatcatttcccaccaaacgttatttcacccactcacttgatgtacatctgtggcctgttcacactgcatatggctgtggacagaaaatgcctcagttcaaaactgacacagtgggtctggaagaggcttctgctgtggctttctctctctggttttagctccgaaccttgtcaccctaacataaggacgatgaacaagcccacgtggaggctcagaaggttccaaatatggttccaactctgtgtctgactaactaatgtgtggcctgaacaaagtattatttaaaaatctaaaatgccaaaagcaactactctatttctgctacatttaaacctgtcaatcacgccccaaacttctaccagcttcctcaattcaccacatgcattatgtgtgagctgcatccatccacacctgttgttacaactttccatttgattgcaaataattccaattcatcataactcacaaatctcacccatttccacaagcaaacttcaggttttttttcaacatgaggttgaaagagaagagggaaagagtggaggaaaaggagagaaaagagagaaaaaatacggaaatacacaacgggtcaatatcaagtccagataagctttcttcatggctgtcacacacaaaagcactgtggctctcagggtcaccctttctgtcctagccacagtgcccaatcactgattcattctcacaatatcaatcaacacacagctttgctgccataactggatgtagtcattccttcccaatgtcaatgtctatgtgttttttctttctcaatcataatatgatatcaaggtctctccacatttctgttatctggatgtcttcctaattttatcttcttgaagacctggttatgtaaacaagtcctgtatacatcatgaaaaggcaaattctggtagcccacattcaatcattattgattactagtgccctactgataactccttctgatttgataacaactcaccccagcctgactcccaatggacccacctaataattatcatcttccaatttgagaagctaataacattaacttgttcatcttgtcaagctagtgagtaagggaatagaataattattgtaaatcacattacagacctcaggcaaagttcatcgcagtgatcccagtagccacagggtaatgtctctaagcatcaggatttctgagtcatctcctgctctgacttcatgcctagcccttctgccagaattacacaagatgtgtcctctaattccccagttatagagtccctgtgggtcctttatcccattgtgggtagtatttcctatttaggagacacaagcccagcacactcaagccactgcccccgagagctgctgagtccattcagctgccaggatggaaagaactctgaaagggaggaaactagttttcttgtaaacttgtgttttaccctcccagttgttcttaatgaggctaagactccccaaataagtataaagagaaaagaaggaataaatacgattctagatttcctacccctgtttccataagagtaattttgccttcacctgctttattttgtgcattccatataattttttaatggattccatttacaacctaatgatagtctgaaaacagctgaacagggtgaccttctagtcccagtctcctatatatagcaaaatacaccaaaggcctgttctaggagtatgagcagaagagacagccacctgtatgcaatgtgatttaaaaaataaaagatgcctaccccaaatcatctccttcccatgctccttgcaatttccaaattcttcacactgtcagagataaaggaagccagacactagttaaagtggggaggacagatttgaaccactaatacgctattgcaatagggaagggagtgcagtgtgaactgaactcaaccttgatttgcacagaggagactgtgtatttcagaagaggaatgagagagtagaaaagggaaggggtgagagcaggctcagtgaagtcagagagtgaaaaattacaaagggttggtcaacattaaagttgattagacaattatgggagttaggattctatctgcccagataccaaaagacagaggccctctctctcctgatggttactttttagaagaatggctcttgggtccttgagaaagacactcttgagcagtaggaagtgcatatatttatcaaaggttacagggcaaggattcacaattgtaagccctttttagtaaatgctctaagaaagggtggttgggcctagctccagggtgttggctagaagaaatagtaaactctcctggcaaccttgagcttcctcaggcaggcatcctaagtggggtagggtagtcctagggatgtggccttgagctgttagaaattattctagtgtttgtgtaagtcttttaatgtggggcacgagtggatgaaatcattggtgttgagaatctgtagttgtgataggaagttaaggcctagtcaagaagggggttcagaggagcatggctaaagtttggtaagttagagaatctttgtcaacacctagaaaccaaagatgctatttttaagtcattaactgatagcactaatatgtcaaataattttaaacttgtgtccctttactgatattaaactattatcaagcagcttagcagcatggtcacttggtcagggctctggggttggagacagcctcacagggtaggttattggagagcgaggaaaagaatgaagaattccagacacaactgctaccactccgaccaaacactgacaacttatttccaagtaactgtcctgccaagcttgctttaaaacagaaaggtaagacttatggtagtataaacagtggacttgccaaaagtcttttaaaatagtttattcttttatgtagagtaagaagaacccacttggaagtttctttccttggcattgctcagtaagcccttttgttccaataatatatagataaactagaggtcagtcattttaattgttaccaacttgaattttactgtaaatatgtgtttgtggcatggctatcctgagaaatagcaagtactcactttgataactcagcaaaggttcattttcttaagggtagaaccctagtgtgtgcttccaccttttccacagaccacatccacctatttcagggtgcccgtgcttcctgagtcccattcctccacaacacaatttggctgcaagctgcccagatagaactggtttataaactggaaagccaagaacttcagtcttcaaagcaggctagcatatgctgttcatgtacaaacaagtgaattcttacttcatacaaaaatctcactccctcctctctttttaggttgtcacaaagtgtctgaatggctgaatgattctgttgataggatccatggtctcttcttgcagtttccttctctgtctgccaatttcacacttaccctcaattctaacagttcccacactggcaatacccatccagtggggttgggttgggttgccagataaaatacaggatgcccaattacactgaattttatataagtaatggataatttttagtataaatacatgttattttaatttcctaatttcagcaactctattcctagacaaaaatccactatccaattattttatcttcctggtgtataaaacattattctggaaagttgtagaactatgataactgcttaaaatataaattgataggctggatgtggtggcttatgcttgtaatctcagcactttgggatgccaaggccggtggatcacctgaggtcaggagtttgagaccagcctggccgacatggtgaaccctgtctctactgaaaatacaaaaaaaaaaaaaaaaaatttagctgggcatggtggcaggcacctataatcgtagctacttgggaggctgaggcaggagaatcacttgaacccggggggtagaggttgtagtaagctgagattgtgctgctgcactcaagcctgggcaacagagagagactttgtctcaaaaaacaaacaaacaaactatatatatatatatatatatatatatatatatatatacacacacacacacacacatatatcaattcatagatcagttgtttccaggagctgaagatgtggggagacactggctataagaaggagggagagcttttgaggggaggtgatcaaactgttctatacattaattctggtggtatacacatgactatatgcatctgtcaaaacttatagaactctacaataaaagggatggattttactgtaaataaataatacctaaataaaccagacttttttaagtggaaaataaatgtacactactcggtatcagacggccctcacacatttcagacaccattttattcctcccttagtatcaccagagtaaatgcctcacaacagctattctatttttttcattctccataggttcacaattccaacaccacatctctccctgcaaacagatttgttcagtcacgcaaccagagtgtaatcttagctggatctggaactataaagatgaaaatagagttcctaccaaaaaacattcctcatgggctagtaggcaaacagaaacaaataataataaaaaaaaagacatacaatgtaaaaaaaatctgtataatgggcaattataagatgttgtactgtacagaggaatagtaaacagtaaagtctcttcaataactcaggaaaagttaaaaatgctggagttcagccttcaaagcagggagttatataggtagataaaggaaggtgagtagccggagaaaaaaggcagacgatcagctgcacaggtgggtcagcacaaacgatgaaagccgttgacactcaggtgctgtgggaattcttgcttgccgtaacagaaaccggccttggctagctggaggagaaaaaagtagactccattggaaggacatgcaggttcagactcagtagaagtcttcatcactaaggacagaaaatgagcaaaaacccaggcgcgcaagatgccaaggagcaagaatcacgaccactatcctgtagcaagaattacagccaggacactgctgctgccgccgccactgaaagccaatgggcgccaccactgacaccaacaataagttctaacagcctcttgacctttaacccattcgctctagagtcagagtcccagcctgagtcacatggctatctatgagcagtgccaggggctgccagaatgcacagggaggtaaggacagcctctttccaaggttccatacacacgacatgtccatgtgactcgcccggaggtcccttagtagccgtctctttggcagatccaccttcgaggtatggaagtgcttgtgttcaaggaactcttagtttacttaataatggcccaaagtgcaggagtggggatgctggcaatttgaatatccctaaagtgcttcctttaagctaaaaggtgaaagtttgaacctaataaggaaagaacaaaaattatatgctgaggttgccccttcccaaaataggagaggggcctgaatccctagcaccattagtatccaggggctctatacgacagtcccccattatctgcagggcatatgttccaggacccccagtgtaggcctgaaactgcactgatagtaccaaacctaattgcggtcaatcagaacacatttctgtttatgtcttccgcccacaaattcaatgccttttttatcttagctaagcacttattgcacactgtggccataacctttgcagatcaaggtgcaacagcaaaactggcatgaatttctttttccctcttcacatcttcatggatagaagattcatttttagcataaaccttggcaacctcagcatataatttttgtttttttccttattaggttcaaactttcaccttttagcttaaaggaagcactttagggatattcaaattgccagcatccccactcctgcactttgggccattattaagtaaactaagagttccttgaacacaagcacttccatacctcgaaggtggatctgctaatgagacggctactaagggacctccaggcgagtcacatggacagcatggacatgctggacaaagggatgctacacaccccaggcaggatggcatgaaatttcatcacactactcagaacagaatgcaaattaaaacttacgaattgtgtatctcttaaatgttccactcaatattttcggacacggttgactgcaggtaaccgaaaccacaaaaagccaaacttgaaataaagggtgcctccggtaatatggcctgtctggtctttctaacctggattttccccactggaaagaaaatctcttctccaactctgtgggtctcatactagcacgctttcgggacgtcacattttaggctgagtaatattctctgtgtgtcttctggctcatccttccaactcgacatgtgctttctggaagcagttatttcacggcagccatgtgtctttctattcccccttgtgctcagcacactgccttccacaaactagctgcctaatgcatgtctgtgttctgcatggatgtgttccgaggcaactcagcatgtgcagttggaaatgtgccgcttttatttggcagagtcaaatctcctccaaaccagacccttttatttcagctcacagaagatccctgccctaaaggcctctgccttgaaccaaacctcaataagccagattataaaccagccaaaaccaccggagattatgtcaatgtgcatgtggctttggagcgcctaaaaactggcacaaagcatcagggaggctgccagtgagctctctgaagaaagcaaaacagggatccgggcccacggcgcgatgttcagggaatccctgcttacagcgccttttcagacattgcataagctacagaaaagcaaaatctgtgaattatctgtcttttaacaagccaaaagaacctgtacagcatcctatttttttttttttatctagggaaaagaaacaataagtttcactaggctgaggaagaaaagggattacatttgtggagtggatagtcttctcatcccatttaaacacagaaatatttaaagagattgtaatgggaattttatctcaggcctcagatgttaccctggtataatagtttctcctttcatccatgactaggacatggtgatgccacaatcctcccacatctccaagaaatcataatagccttctttcctgacaaagttgttgaagaggaatagaagagaacacagactcattatgtcccttcacaaagcagtcacatcatttaaaaaaaaaaaaaaaaaaaccacaagtactctcatttgcggccaagttcaggccttaaataaaatttacagaataaagtggctatttaagtggagttttattaatattccagcaaaagagatataatgaaaaagctacaaagttcagagaagagtttaaacaatccaattacatataaagacaaataataataatatggattttcaaggacattgtcctcagaaaggggcataaacacaaatatcagcctttgttcctctgtatgtaatagaaaaaagaaaaaataatttcccagtcttccatttctatgagtttttattcggaacttctgttatctctcagtaagtaaatgtaagagtattctctagagagctgttttattatacaacaagtacaccataaagagccatgctggccaaaagtaatgcaaaatggaagtcgagtcagacttccctttcactatgatttgccatccagtgagtcagagcaatatcttgaaactgttctgaatgaaaaatgtttggtttttttttcttctgttgaattaatgttcatgcttcaaagaacagtagaaactacaaaactctagagccacagagatcattaaacccctattgcattacaggagagtcaacttggtttaaagtagtcaagtggcctacccaaggcatggcacagagcccaggcaggcatccaggcctcctctctctatccctgggctcctcctgctgctctccagttttctatccatgccacggtgactgtgaccatgccctttcacagaagtggccacaggcagattctgaagcacctttgtgtagagcctgagagcaggttacagtggtcagttcatgctaacccagaagtggagctggaggggtaaggaagagctatggtcaccactccccaggtgtgtgactcaaatctgaatatcaggattaaaattcctgaaagattgtagacaagccaaatgccaagtccatttaaagactccaaacacagcacctttcatacttactaccttgttaatacttaaaaccaagagaagaagcccatacacagagcgtttcccaagcaaaaacactgtgttgctattaccctgcctttaaaagggcaccatccaaggccaaaattaacctcaaagagtgtagagccacataaggatgtacaaaactcagaactatgcaccagattgaaaatgtagtaattataggatgctggagttagcttgccaaccaaacacagacccatcagccctccaccccaccactgtctaatcaacatgaatttacaggcaaagaagagcaataagcaatccactcacttaagttaaggagagaagactccatgaggcttaacttctgcaaacctcttgcaaagcaaatgcaagagaaacagtttcaaactataaaatgtttgcttccttggaacaagtaaaggacgaatgtcattttcaatctctgcttgagagtgacacaggacatggtcagaactctgtgatcatggaagacagagaagaataagtgagatgacttgatacttgttaggcagtctgctttataatcaaaaggctcatttcttttttctagagattggttttctcagctgtaaaaggggagactgaaccagatgctctttaaaatcatctcctgctttgaccatttttttgcatttacttctttccctttacgctttattgtttaacatttacaataagatgtcaacattaccatgtattaatagtagtggaaggtgcgagctcagtccagcagcatgattttgtgaccgtgggggaggtttataacctctgcgtcagtatcttagtctttaaagtgaagcacctgtctcatagggttgttacaagttcctatatcacatcaaatgagagaatgaaaccaaagtgctgggaacaataactgacgtggaggaaagctcaaaaactcttagccattattatcttttattattacttagttgggatctggtcttaaaggtgaagaatacagaaccagagaaaacaagacaatgtttaactccttgagatcaataaatgttatttctgagaataggataatcggaaaaccaatgaaaaaaaaaagactgacaatattccaaaacttagaaaagctgctatttttcatactggtaaaagtctctcagaagagaaattcccaagggctcagcaaaatgctacaataaatagtgcattctcaaaaggggagcaatttaagagggcactttggcaaagcctcgtgacttatctggatggaattttttaattttatgtctatgcttcaaaataggcaactatgtgattattcctggtgggcctattaaggcatcttgtcaagcttctattcctttaaatttattaattttaatgccatgctacagaaaataccaaaaaaattaaatatgtattctttcagttttgcaggacaaagctaagctcaactctaaagggactaggatatgtaaggaaatcctaattttaaaatcattaattttaaagttaacttccaagggtcatttcccacagggttgtgaatttttatcatgctcctaaaactgcctggattctttagaacattgcgtggctcagttcttgtcatcaatgaactaggtctgctgactctaaatgtaatcaacgcagggtagatgagaatggaaggtggaacacccctgcctcaccaaacactaaaaatgctgaaatgactagcaacctgaccacagcagggcccggaaaagggctgtaattagaaacaatctcatagcatccaacctgtaaagtacattcacaaagagatgttgctactctgcaaatggcaccaatgatgataacaatgatgatgatgatgacgatgataatggtagtgtctattaagcacatatcttccaggcactgttctaaatgctttaggcataatacctctgaggtaggaattgttgcctgtcacacatccattcttcacctttctccttctctgctctgtattaaagagaggcaatgcagagtcccttgtcagttgacttctggctgtgtttggctacaagactggagggtcgaaagatgggaacaccaagatatttctctcctctctcggtgccttgagcagaatctctaccatcaaaaagctttctcccatgcctcctccagttacaccataattccagtgacctcagtctgtggacccagtaacactgtctccaacatattgtcccttcaaattagaattagtggatgcttcctgctattgctaatattcgggttgtttaatgaccccatttggcttttcagctcttccctcagctgcatagccaattaaattctctctggttcaaatacttaagatgactcatcttttttttttttttggaccattatcatccacattttccaaattagaaaattgggagtagtttgtccaggattacagagttataaactggcaaattttgagtccagtgattcttaagtcatacctcttggccactacattatattgcctcttcttaatgagacaacataacaataggttagacaataaaaaaggttagaagtatatgaaaaggctcctatctacccctgcttcatgaacaatgatcctccacatacttgctatcttgctgccaatccttctccaacggacatagcaaggggttttgtatggactgtgagtttcgctttgctaagggatctaagtttatacttcagtcaataacaatagagctctctattcgttagttttggttcttgattttttttttctgggcaccttaaatttcctgtaacaaagtgaatatatcatgaccttccttaactaggtatcaatctcttatagagtagaaagttatatcaatggtctattagacaaaggtataacagtgaccaaaatgaaggacccataaagcctttctgattctctactaagtactctttccacaaaacatttctcttgcattttatcctataacctatgcaataaaatctttatgcaagaattgttcaaattttcaccaactacctcagtcttattacgaaagcaatacaggagctaagtagcacacaagagataaatagtttaaacacacacacgcaaacagatgaatttactcaattttaattgatcttattatctatccaaagattttttagaaaaacactcatctatatagtcttctgtaaagaagttcaacaaaattccaaccgcattttgacatagttcattcactatgttcatctgccaagatttaaaataaattatattgattttctgattattaaaataatagacatattgtggaaaaagtgaaaatacgaagagtataaaggagaaaatagcaataattattcaaatcctagagataatatttattaatactttgactttttttgcaatcttttaattttttgtctttttttatgtagttgagattatactatatacgtattacatacacgtatatatagttttaggtcttactctctaaaaaattaacattatattataaaaaagggtgagttcatgtcctttctagggacatggatgaagctggaaaccatcattctcagcaaactatcgcaagaacaaaaaaccaaacaccacatattctcactcataggtgggaattgaacaatgagaacacttggacacaggaaggggaacatcacacactggggcctgtcgtggggtgggggaagggggagagggaaaacattaggagatatacctaatgtaaatgacgagttaatgggtgcagcacaccaacatggcacatgtatacatatgtaacaaacctgcatgttgtgcacatgtaccctagaacgtaaagtataataataaataaataaataaataaagggagagaaaagtaagaagcaatgaaaagaaaattaactatttgatgagcatctaaaatgtgtcaggaattactaaataaaagagctcttccctctccaaaaaaaaaaaaaaattaacattatattgaaagagttttccttcatcatttaaataatcttacttatatttgttaaatagttgcataaaactatagcaaatgaacctgccacaaattatttatacctctacttgaatattaggtactattcaactttttattattaatagtatttctgcaaccatccttatgccaagatgactgaatttcagatttttctctaggctagattcctaaaataggataaatttctaaaactgcaattactgggccaggagagtaaatatgttcaaatgcctgaaacatattatcaaactgttttccagaataatccaaatttctatttaaatgataaaatcactgaagcatttctaaaatatgttcatagtctcttaacaaacctgttttcttttttataaaaaaaaccaaagcttatatccgttgagtaaaattcaaagctactcattcagttaagaactttaaatttatcactactgttttcttctacttattttatttgggtttgtaaaaatctttaaaaatacatatgcaacatgcatgagtttgtaatcgattttgaatttgccaggatgaacttttccactttcacaaggattatggtaatgatgaataagtttttcgtttatcttattcctactgaccttcttaagagaaattcaactggaaagttctcctagtgctgagtggctctgacagtccagagcatgtcagatgtgggtcctgctggtgacattctaacataagctgaagaaagcaatctgttgacattcagaaagcaataggcagaaaggaaagctacaattttctatgttcaccttgtagaattttagaaaaagtattcagatgctgttctctaatactcaaattaccattatttactgcctcttacaaaaatgacaggaaaatttgttcaatccatttcccatggttttgcaaaatctctagcaaattgccagtctaatattcatggttgtgcccaatctactgggcagtagccatgactcatggtgagatattaagcaacagccatgatgcaggaatcagaatgtgcatcccctggcctcagctctgccactaattgtggggtctgagccactcacagcaacccagagtctcggtttttatatctataaaatagagtctggaataaaggggataaacactcctatttgctcttacatttcatgattttgattccttagtaaagcattgtttttcaatgctaattaagtattcttcccacatttctataacccagttccccttaagaacaaaattccaatgatgatattctgccaactttggaaatgacactatataggctaattatttaaatcattaattcattccacaaacaatgcattgttcttagtaatgggcttgaagtgatgaactagagagaagagtttcctgctcctacagagcttatattctgaattgtaaacatgtgaacaaatagacaaacaaaacaatttaaggcagacaattaaacagggtgatgggttagaatgattgggtgatagcaaatttgctattttcagtagggtggacagggtaggtccttctgaggaggacacttaagctgtgaactgaatgatgcataagagccagtgtgtccaggacatgggcagaaagaatgtcaagtgcaaaggccccaagcaggaatgagctccattagttcaaaaaacagagagggccagtgtggctggaagttaaggagcaggagaaagagtgggtaagaaagaagattcttaggagccagatcatgcagacatttgtagaaaacataaagggttttgcttttaatctaagagcaatgaaaagctgtggaaggtcttaagtaggggactgacatgatctaaagtatactttaaaagatcaccctgactgttgtgtagagaataggttgcatattttatttccagcaatatactagaaaggactccctgttctctcacagaaatattgaaaatactagttttggggaaaaacaacaaaaaatgctggataaaatattctaaaatatttaaatgcagacatgatttagaaagtaaaggacatgcccagacaccaaaatcaatgagaaagcacaagtctagacagctaaaagcactactgaagccagctgctatcccgatagcttcagcccacctctcataccctggaagagtcagctacatataattccttgcacactgagaagttcacctgccatgatgggaaaaagtagaacagaggaaagaaaatacaaaagctatcatggtgccaaattgcaaagcgaaaactcaggattacacaaaacctccatagaactgtaacctggacctggtattcccttctcagttgttttctgccgtttttggagtaatcacaatcagcccaaaagattaaagctggcctttgaaattaaatgggcatgacctaaattattgcccgcctactttgctgaggtatatgcccataagccctacaaaggacacaataaacactcaagtgtttcttaatttgacttgtctcagtgaaacaacagaagtcttgatactgtcccttggccatggggagagaattcagggtgaatatagggtgaataaaagtgttcaacatgtcttcccttcagccagcaaattcctttcagttagcaaacaagaacctggggagcaacactcagcaatgattctatgattccttcttctttttccattgtttctcctcacaacttctcatctgatgctccaaacacagaaaaaaaaatccaggcagagtattaggaaacatggatttatggattgctccctgcaaactaatattaagtttaaaaaatgtctcttgaaccagtaaatctacctctgagaactcaaattttaaaaaaaactcaagtatggaaatggtctatatataaaagtattccacacagtattaattagtcttagtagaaaaaaatatttgaaacagctaagtgaactatgacacacttggtagaatcattatatatacattagagttgaaaattcttatgaaataatgtgaagtccaactgcttaaaatttcatttttaatatgatgactttcatggaactctagaatatttgttctttttttgcggcttgcctgtatattacaaaaattatttaaggaattgatattacttttataactgaacatatattttaaagacaaaatatataaaaacagaaaatgcatactttaacttcagtatcctaacattagataaggaatggaaagaaatcccatatacaaattttctttgaaaacagaatctgtaattttattttgctaagaatgaaattggggaccactaggaaaaagaggttaatgcttttaatattaatacaaatagtgtcaattatcatgtagatacaaagcaatatcttcaaggaatcacttttccaagctgtatgtaaattactaaattaaaacctaataccacaaagtaaatttggaatcaaataggtaaaatgtgatatacagtggagcatagcacaataggaaaatgttgaatgcattaggatagagcaatgacaaatactagtgaaaagccaattgctgtttttctcacatgcagactatagttaatgcactgccccagccactgaacacatctgacttaagctgaaggaactcttgcatggatattttcgtattaaatacatgaaagaaaaaaattctaactgaaataaaactaatgtaatttatattactattgttaattaaaatgttgaggctttcctagttacgatgaataaaaacagatcttacaattacagacccccacatctaaggaaaatcaaatagagactgagtgtatttctcaaggtagcaaatactttttattttcctttttcctatttgcaccattcatcagtagggcaaatttaaagatcgaatcatgccactttaaactgttggcatttactatctaaggcagaattaaaagatttcatttcaagccaaagtccatgaatacaaacgtcaatccaatcacttacttgggctggaagaaggtaagaggactctttctgaaatttataaacacaatcccaaaataaaagtttcaaatgatgaaagcagagttttctcaagccattctttccaacagagctgatagaccctgattttttttatatagcaggtaagtaaatcctaaatcctaaatctttttgaggttttcgtgtctcttttctacattaacattaaagtaattacaaagtgaatttttaagggtggcaaaaatatacatgcatgtatcagtacatgttttgagaggagagtggattgggaagcaattgtgtatacttcttgtttaaaacaatgtaatgcccacttcatgaattcagataacaacatcaatgaacagattgccaaccagttggaatacaggcctaggttttgaaccacttgaataagcctcctaagtaggttacagagtcattcatggagattatagggaaggatttcaaatagcaccatctgttagaaccagcaccctgaaaatattaccctagccaattatcacttcaaaataccacaggagttcactccacctgtgttggaacaacttggctacaacccatagttacatcctggtgtcagctttgtaaaccatggctcaggttcgagcctatcagtcagtcttgagacaccagctgctcctaggtgcacttccgtgtcttcccacagatgactcctggcaacctcatactggacaagccttcaggctttccttgtcaagatcttttcttctaggacctcaactttaacctacatcctttctcatctctccaggctaggagttctccacatactctgcccaccctgatagcaactgaggtaggccagaaacttctcatgcactggttacctcctgagccatccacagaaagggtcacagcctagatgcttacaggtattcagcaggttacattcaatgagtgaaaagtaggccaaacacaagatatcagaaatgcgtcgatggttgggggccagcaaatgcaggccccacctaaggatgacaactattgctcagtcccaggatgttgtcaacacgcaggatgcaggacaggtgtggccaaatggcctaactattcaatatatatgaaataaactaattttcagatttggctcacttttttctaaaactgtttgggccaaacaaaacatcttattttagattttttatggtaatcaaagggtcttgattcgagtttgagtggctctaaaaacacctagactgtgaccccaaaaagatccctactctgtttcctcctcttaaatttttttcaagagcttcagctgctataggcatttatctgagaacatgagccaaggttcagaggctgtgtgccaaagaattccagcttacacctgctattgtttcagtggattaaaaactacaacaagcagataaaaaggtctcaggtgccgttgctgatctcacagagctgagcatgtgctcaggcatttttggcagtattctctgaaaaccagtttagtttcctggatcatccagaagtaaatgtgagaaactccgtttgtggccctagaaaagaaagcctcagcacagagccaaaaggccacagtcaacaacagcatagtataatccccgtctagctcagtcttatgacagagatcacctactttatggcagagattagagttgcccactaaatatccactcatcttcttctcctttcataacagaatcccatttttttgctaggtatatttctgcttggccaaatagcctaaatttacaggctcccttgcagcttagtgaggccatgtgacaaaattctggccaaagagatgtaagaggaaatattgcatgggcctctggggaaggagagtacttctcccttttctgctggctggaaatcagagatgatatctagttctttagcagctatcttggatcatgagttgatcttgagaatgtgagccatgtgcttagaaaatggataacagaacaagaaggaaattgggtccatgatgaccttgcagaattgccatgccagccccaaactgcctactttcagacttcttttaacataataaacacgtatgtctgtatttaattcactatttggaaaggaatcagtattattatagctgaatataattatgaagcaatgaatagtctctcactttgctgggtcatctttcttccacctaattattttatttatttatttatttatttatttatttatttatttttagagacagggtctcattccatcacccaggctagagtgcagtggcatgatcacagctcactacagccttgaactcttggggtcaagcgatcctcccacctcagcctcctgagtagctaggactacaggcgtgcaccaccacacccggcttttttttttttttctgtagacatgtggtctctctgtgttgtccaggttggtttcaaactcctggcctcaagtcaaccctccgctttggccttccaaagtgctgggattacaggtatgagccacagtacttggccttttttatctttttaaactcctattgtgaactaaattctcctatatactcaaaatgtttctatcacacctccaccttaaccaatacataccattctccctgataatacaaatttcctcccaaggcacagtagtgagcctcctttttgcctgtctattcagcttagcatggctcacagttactggacagtttgcatttctctcttctctctggagactgactaggatgcacagtccttctagaagatgatgctcctgacccatcattactaaagaattttgagaaagtattttctgccacttttctacactttctctctgctcaaaagcaggtagtatgatgaggtaagaccaagagcgaaagctgaggccacaaaagagagtaaaactaaatggcttacctggtgataggacccactgctttggcctctaattggccctgtgccttcagccatagaaataagcagccttagacattagctagaatattggtattttcaatctctagtttgaatgacaggaccctgaaggcaaaacatttcctgtggagattctgcatttctgcctgctcttgcttttatagctcaaacaactcaattttgttgggcttcaaagtacagttcaagggatattttataaggaaaattaatgggcctggggatatcaccagtgtaactcattgattagagggaaaatatggagtacgtgtaaatattctgtgatggatttgaaaaagacacaattataattatatttgtgattatttctagtggtactcccacaaatgtccatgaaataacataatgctcaatgacttgacattgaaacaatatgtaggaagcatgtgttccaatgggatattgattatggctcaactaaagataacagaatctactgtagctattttaagaagaaaaacatttaagacatataattaaatggcttagagaatcactggggagggctgaatacatctaagttgagccttcagaaatagttcccaagcaacaccacagaaatgggctgctggaggaactgctgcctcttctgggatcaggaagctacctgccaccttgggtcactgccagttccataaccacagtgctttgccacagttagaaagcaaacaccagcaaggaagccagcggatcactaaccactttgatcctgggaccacccaatcaggaagctgctgaccccactgctactgctctcagctcccaaatcatacactcctcactgtgttcctcaccagcacaggtgataccttacatcctgcctcttaacacccacactgctagcaaatgggccctggacttgtgccagtgctgaaagcaaagcaacaagatatccccataaccctctgcatggtagatgaaatagcagaagttagtctctgctttccttccacctactaaatctcataaatcagtacctctgaactcatgtcaactaaaggatgcttcacaagggttctggtgagcagaattcccccaacagactagcactttcatggattcagtaccttatctccagggaagactaagagatggttccagctttcacagggccaggggtacactagtaagaaattggaatggatgttgagagataatccataacatatatcacagaatagtttacttttaatgtgtcatattaatatattaataagtatgtgccaaatactttatatgcatacaacactatatattgaccaggcggccaataacatttgctgagaaattcactgggccagggtcttcaatttccatctcctagagcacatagtgtctaatccactatgttttttataccaccattcacgggatcatatttaagcagctactgcatgaatgcttacttataagaatgaacatcatggtaactattctggaaagctttataaaaagatatatactctcccaagaatcttaataactgataagataatacagtagaaatatgaacatctatgaactaagtgacagaaatatgaaaaatgttccaaatcaaaccttgaaacttagttataattaccttagaggtgaataatttagaaagaaaatgggggaaaggaggtatatttgaatcatcactctcatttgactatttaagaaacattatttaagttatactgactacttttattccaaagtagcagatacagaaatagtgcaaagtaaacagaagttcatacagggaacaaagtgtgtaacagaaaatggcaaggcacactatcaaatactgtgaactgattttcagaccaatgctgagatgtgttaaagttaagtttggcacacagcagattctttacttggtagtaaagtttggctcaaagcagtctccatacatagcaagctgtaatctaggagtatacccttgttaccaagcaactgtttctccgccaatcatagcagccaaatcctcagtcaattcccaggctgaaagctgccaaattatgcccacataaggcaaacattgaattgcaccaacaaggtaatctctatatgttatttcctgttttctggttataaatctaagtcaccacaattggaggttggggcattctgaaccatttttagtctgggatgttgcccagtactaggacgtttttctggctcaaataaatttttttcaatgtaattggtctctgggttagttttcattttttaatgtcattgaaaaaatagtccaagacatttatttcattctgttggacactgaaattaatacgcttgataataaatcactagagaaaacaacaatttgactactaattaggctacccatttggcagaatccactctccaatataaccaatttgcaataaatcatgtgagaaggcagtgctggtggtaagggctatatactatgattgccattcccacagcaaacttaatacagatgagaattatggaaatgccatgtaacataggaggaataactaataagtttcctggaagctgtttctttgttactgtttatatttgtttttatttttaccgtaacagaaacacacaagatcaagaaattatgtgccactactgcactgtaaaaatcctgtaaaaagtaaaaacaagtcaaggtgtaatagtcaggagaccaaacctaaggaaggtcactgtgacctttggtcacctgactattatactttccctgcactttgcaaatgtatcttgttgcacattagactagtactctagtattcataggtaaatattcacattgtcagcaagaatatctggctgcacaactggacaagttggatgatgataatctactttccctacagtctcctggcagagggccatgtacacctggatatcaaaccattagtaccttcactccttggaattcagattgacctctaagttccttgaaccagtccaggaatagagaatctttccagacatgaaaaaccttttaatctactacagctgacccttgaacaaggtgggggttgggggcattaacccacgtgtagtcaaaaatttgagtataacttttgactcccaaaaaacttaactactaataggctactgttgagcaatactataaacagccaattaacacgtattttgtatattatatatatattatatactgtattcttacaataaagtaagctagaggaaagaaaatgttattaagaaaatcataaggaaaagaaaatatatttactatatattaagtggaaccatatcattcaaaaggtcttcatcctcatcatctttgcattgagtaggctcaggaggaagaagaagagaaggggttggtcttactgtctcaggggtagcagagccagaagaaaatccaagtataagcagacccacacattccagacttgtgctgttcaaagatcaactgtacttcactttatccctacatctagtctggttctcaattcagaggaatttgaaaataagttctctctcacatttagtaagaaatgcctcaggaggggtcctgggaatgctcccaagagagtgaaaaaaactgcagggggtccataattaactggtcaggaacccccagagccgcgtgtcagtctcacagatctagagctgcccttttatcaatccccaggaacttcagcattacattcccattaatattaacagtgttctcactgacaaaacagagtgattattatgttctcactggctctgcttattgaacagccccaataattaccttgaacattttattatcaagatgaaaatgtagcattttacctaaccaagttgtcaatgcttttctccgaataccatttgccttactcctcacgcatttaaatagactgccttgggctgcagttgttatttttatataatttatgaatctggagaaatccagatagtaatattactatcagcatattcacatctgaatgataatttttatgaatactgtgtttttctctggctacaccaatatctacctatgattaaaaatgtctgaattgaagccatttgacatggcttcaaccttcttctaatttatttcttttgagaaatttactagttttccttcttttccccccactttaaaaagttattttctcatcatttactattggaaaaatagtactgaatattcaagtgaaccaaaatgagtgagtaaataaatgatgttgatattgatgccacacactaaatttgcttcatttagctttcatcacacttgtttgattaacggtatatatcaccaggggccccatggcttggaagcaccagaagcaaggaaactggcatgttagtgcatcatgtctggctgtgctggcagggcctctgtagctctattactgctattcatctggcatgcagctatggaactggacactcacgtccatcaacacagctactagctccaatgtcataaattcactggtgatgtttttacaggttagggaaaaaatgagcttgataaagaaaaatactgcaactagaaacagaggtggaggaaagaaaagcatttcaatcccagtggaaagcagacagaaagggcaaggagagggtaccaggagacagatgtgttgcagcaataccaaaaaaaaaaaagcagggaataattgaaatcagaggcccgagagctgtcccacaggttaggtgaggccccaaaaatctaactttatcatgttgctgctccacagaaccaagctcttctcataagcctctgctactaaataattttttgagcttcattgtatttatgaatgcagaaccaagctgtgcagtgaattcacttttaaactctctggcttattttctgagttgtctttgtaaaaaaaaaatcactcttactcttttaacatctgttatgaataaaccatgccatgccttctttcaattcatttatctgtatattcaactttctattagctacaatttcaactcattaaaaaattatcttatcctgggactagagcctgatttttattttttatgccagaccaactgcatttcaaagactaaacttttatgtctttctacttggaatttttactagatttctatcttttggcttctgctacctctcagtaaagttgagaacaaaaacatttgaaagactgaagcaatgagaattaaaagctttgggttatattattctcctcataagtgaagtaggatccatagtgcatatagaaatatttttaacatctgcttggtaataacatcagtagtaatggtaacaacacaagtaataataatatgtttttattcaactagcgtttctcatacatcctcaaatactgaacttaggtggccagttatacatatttcacatctccacttaccacatatatgcagttgtcctgaccctgcctttattaacaaaagccatacaatacatagtaagtacacagtatctcatttaatcttcactacaaccctatgagataacatttttattactttctctattttatagatcaaaaccctgtggcactgagggtttagtaactatcaaggtaataagtgatagaaaaggaaggggaacccaggcagtctggcaacagagcctgcagatttgaccactctgctatactgtggtgttcccttgaccgcttcctagtgactgatgtggttgagaatgtgaggactcaggtgcagtaagggagtagcccttctgcctgcagagaagacggattatatagagatagatgctcatacactgctgattcccagggaatgagatagaagcaaaacatgggttcctggctggtttttcttcatccttttgccttttacttcttcagcagtctttttgatcactgcatttggcttttggttctcttaaccatcttgggtagctggcagaggcattgataaataatcttgttttggctgactgtatcagacatgttatggtatggtatgtgaagccaataaaatatctcattctgatagatattccctgggtggtaccaagcactgcctttggcttcacactcataaggcactttacaggacagccagccatctttcccaacccatgtcacccattgtgacataggcctgtcatcccagggcctgagtcttccagaccagcgacataatttaccaaagcaaaatgccaaagccccttagcagcaaaatataatagttaattttgcgcattatttaataaggtttcattcaagttcagtgttgagatattacaagaaaaaactacctatgtttttccctgaatttaaataacagacataaatgaaatcaaatcactagcaaacaagatatgtgtgctggtattatatgtgatatttaggaaatcttttcactgtagaaggacaaacagaagcaagtttttattctttttctatcaggagtcctaggtctgtcttcattcactaattaattcatttaattaatcaaaagacatcaattgggcacttattatgtgtgggtgacaagggtgaagatataacctctgtcttcaggtggcttccattctaagtgcttaagtaagaatatatgtggtcttccatagcctaaacagaatattgttatattgttataggcagggcactgtggctcacgcctgtagtcccagcactttgagaggccaaggagggctgattgctagagttcaggagttcgagaccagcctgggcaacatgacaaaaccccatctccaccaaaaacacaaaaaattggccgggcatggtggcacaagcctgtgatcccagctactcaggaagctgaggtgggaggatcacttgagccccggaggtagaggctacagtgagctgggatcgcaccactgcactccagcctaggtgtcagagtgagaccccatctcaataaaataaataaataaacaaacatagaagaaaatattgttataagaacaaggcaccttggaaaaataatgagtttcaaaggtgggtcttataaagaagtagtagccgattttcccctataaatatttgaatagaacaaataaaaggatggaacttcctatttatgtcttattcttagaaagggcaacaaaaaggaaaattgcttgttccctaaagacttcttaaaatatttgctcaaaacctcttcacaaggacaacactttcagtaaaacacatcttataaaatgtcttctgacctttatagacagtcagtttgcctttcccaaagctgttgttgcacactatctgtgcattatctgtgcactaatattatggaatcatttggtaaattggtgtctgatccacctgttctctttcttatccatctacccccacaaaacacacgccttctcccatgtttctagtgccatattttcttacccaacatgacatgctccttcctcacattcatcctctcatgcttttgtaaataccttttgttaaggtatttcataattatgctgcaagttgcagcactgtgccagtgctaagcactttgaaaacacaatctcgaacaccgccaataccctacaaagtgggtaagccccaacaagaaccttgttgttgaaatgtccccatagagctaaagtggatgtgatttgttgctagggcacaaggtctcctctatctgtgacctgggagcaggggtgagatcagacaggtgggattgctcacacaaaaatcaggcaaagcagacttggctttttgaagtcatgtaccaaaaacatactcatattacattctttctcagacaaagctgtaaaacactgaccagaagccctaaattccaagatctttgcagaaggaagcattaccccattaacatgatgacagcattaatctgagaaaatcatcaagagtaaattttcacattcaactaaaatgcaattgcttttgaaaaaagctaaagaagaatgtgtaacacaaaaataacttacaatcctcattcagaatatctgccttttcacacagcaatggcagaaaaccagcttaccaccacacacatctgctatttactgaagggaaaacgtggggaactgtggtcagcgaagaaaatcccttctgtggctggagaccgaagaggccaacttcaaagcaccagagagtagaatataggagttaaggatttacacctaattaagcttaaatttaagtaccttcatccatacctaatgctatatgtgggtcttcttttgtcattttatagggacagtgctgaatcatcaagtcttctcccagaaactatcacatgcatggttggcatctgtgctcttgttatcatcagaaataaatcctatgtaagtgtcccaactcaggagaccactgttagagaatgaatggtgagcttcacaacgcagtcttcactccacgactaatcatcaagtgagcagtgtttacttgaattattagttgaataaaaattattttaggaaatgaactatcaaatcctagtcaacttgcaacatcattatgaacatcactatcgccagtgctaagcactttgaaaacacaatctcaaacgccaccaacaccctacaaagtgagtaagcctcaataagaaccttctctgcatgcattgagatgtattcatttctgagctcagctaagtgagtgaagacttaacaataattcagcaaagccatacaatgtagtatctagcatagtgatcaagcacatagtagatgatcaagcacatgagacccaccttccctatgtctgatctgttcccatggactggttcccaataaatgttggatacattcaaggattgaatttagtttgtaatattatttaatttgtagaatttaataattgattagtaaatcaataattagttacttgatgtagctgtgaaaattaatcaatcattgatgcaaaatatattaaagaatgaaatcatgattcaataaatcaatggtaactacatgaggaaaataagacattctttgataatcagcttaccttctccactctaataaatcagtctgtgccaaaaatcaagcagacaaatactaagtaaatatcattagttctgttcacaattagactttctgccctcccttgtggatggttttggtggggccaggcacactgagttctgttcaatgagttttgagttgaagtgtcacattccatttctacatgagcttatttaaccacctggggtaacatcctttagagtttcctttcttcccaagcatggtaattaacaacgtttgagatggtggatgctccatcaacccatgcctgagtgacaagaatgaacagagcactcagctgacccacaatggacagacagcatgagcaagaaataaattgttgttgtttaatccacatcacagtcgcacatcttagtccacagtaattgataaagcaaataaaacgccaagatcctaaaacttgtaaaaaaataatagtgagccaggaccatgtcacagcccagactcacagttactgattttgctcacctaaattacaggctatgtccttgtctccccctaaatacctttactcttatctatttattaattccacaagaatttaaaactctgctttctgctgaagcttgtaatcagtgctgggaatagtgaggagagaaggcaatttatgtcctacagaaatgcaatacacattcttgttgaggagattatactgagagctctgctcaagagatgtgaaataaaccaaaaagtgtcatgagacccaccttccctatgtctgatctgttcccatggactggtgttgatgaaattcttttggccacagaaacccatttgctttcttttgtttcatgtcttaaaaagatgagtagaaggtcagatgagtcatcttttgggaacctgagaatttcaagctttatttacaaggatttcatatttttccatcaagatgaagcatttaacagaatttcacatttttctgccacatggtaacaataaggatgatgattgatgaggattaaatctcaatggattatttactgcattagttaaaatttcatcagcttcatgggacatctcctgtccaacatgtcttagggtacagataagaaatattattttatttctggctaggcacagtggctcacgcctgtaatcccagcactttgggagactgaggtgggtggatcacctaaggtcaggagtttgagaccagcctgggccaacatggcaaaactccatctctactaaaaatacaaaaattagccaggtatggcggcaggcatttgtagtcccagctactcaggaggctgaggcagaagaatcgcttgaacctgggaagtgaaagttgcagtgagctgagatcatgccactgcactccagccccctgggtgaagaacaagactccatctcaagaaaaaaaaaaaaaaagaaatattattttatttctgtttgatgtttaaaagattaattctgtttaccttggttcccaatgagccacttataaacaattatatgagtaaccacagagtttcagggtttaaaaactgtctctagctgtgcttatcaccggttgcttatcaccttgaatgcatgttttcccttctttctattggaaaagcatttatcagccatgcagataggctcaaagcaaactagaagttcactacatttatttaatggtctgcaaaaatgtcatcagccttcccattcttatcagaattatagaggtaaagctttgagtgtgtatgatttatataactatatctaccattagattatcatacagtctgactttcaagtagtatatatttgcttctttttctgttttaaggccgtacttggaatttgctgctcaaatcatgtagctaattccaacagtaccatcttttactatttcctcactaccctcgaaccctattctttccatcccttccatataataaaattacataccaatcaagagtcaaacagattacaagtaaagccactgaatgtgggcaaattgtaattcgtccatctaacaaatacttttgagcactcacttcatgccagatactgtccttgattctgaaaatatagcaataaagtacaacagagaaggtactgctttcacaaggcttacattttaatgagaggcaaataataagtaagataagttcaaataagggctatgaagaaaataaaacagagtgatgggatactgtgataggagaagtggcatcaccagaggagacctctctaagaaggtcatatttgacttgagacccaaatgaaaagaagccaatgatctggagaaagagccatatagaaacagggactagcaggttcaacaaagagcttgaagtgagaaagagcttagtctatttgaagaagagaaagaaggccagtgtcactggagatgatgttggagagaaaggcagaggccagcccgtgtaattcaagagcttcagtagttcaagatcttgtagctcaagatctttaccttatgtggaataaaatccaagatctttaccttgaactacatgggctggcccaagtaggtggaagttactggtgagtgttaagtagaaaagtgatattaagttgtaactatgcaaatatcactccagaagcctgataaaattggtcaaacttctcaatattcataatagaaagctagttctaccagctctaccaggaattcacccaggccttcctgagtttgaaacagagaatacctgagttccaggttctcctcaggctgctcacacttgtcttttcagaaagaccagccaaactgagggatcctgttgagctattttctgaattcttactctgccagtgtaatgtattacccaagccaggatctatcagaagatcattgtcaactactttagagggtagacagtaaggaaaaattgaagataggggaaattacatgctttatcactggtctagcaattatgtggatctttacagaatttctttaggaaagcattagaaaaataatcaactctattgtaaaatattaagttatttgtattaaataacttatttaattgtaaattaatacattgtaaaatattaaatactatcataaaatattgaattctgatcttaatagtctttgataaaaacttaaaggttttcttacacagaatcagtaaaatgtcatttttttctcaagcaaaaaaataaactttatgaaccatgcttgcaccagttctgtgaaatgccagcccaatttaaatttacctagatttgttttcaacttggcagagtgccattggtgcttagtcgttaaaacaggtggcatttctatcaagaagtttcctatttcttcttagaaatgtagattaatgtgcctaaaagattaaatatctgtttttaaaaccaaaatatacagattacctctatcccaagaagcagaaatgtaagtgtccttcccattcttctctttcttttcactgccaatcctaaacctccttggaagtccatgaagaaccacattttaaaaaccttgatagactcgcttcagaaaataaattttttttaaataacccacaacaatgtttatttgtataatccaagtgacataactagcctatcctccaaatgatagagggataagtagatgacatctctcctttaaaactcattaaaagtagagaagcttcccactcaactttaaaataatacaggaacatatttctaagggcaaacttatataccagagcagaggtcacaaactgacacataaatacctaacgtgcccaacatattttctccatcttggcatgcaacaacatgaggagaagtcttgcaatgttagcacaaacatttgaattaattgtcaatattaaataatctgatttcacatcttgatttccagctccttttgaaatgtcagaagatatggacccccctaaagctgcatgtttgcctttctgcaagacaagaatcccaagattgacagtggccactccctataaatagggaaatactctatttgtcaagtccctaccactccttacggttttttaaatctctctctgcatcattcatttacaacacctgcccaacctgtgcaagcaagccttttttggtactaaagaaatagcacagataaatagatggatggatgaatcaatagatagataaatatatcacacctaaattatcaagtttccctgaacagcaaaggcttagagcaggcactcttgtaccaagggcgctgagattacaacatttcttgaactttgtattcctcagattaaccaaatcaaacaacagacttacatagttcaggccatctaagaatctggccatttcggccaggcgtggtggctcacccccgtaatctcagcattttgggaggctgaggcgggtgggttacctgagttcaggagttagagaccagcctggccaacatggtgaaaccccatctctactaaaaatacaaaaattattcgtgcatgatggcacatgcctataatcccagctactcgggaggctgaggcaggagaattgctttaacccaggaggcagaggttgcagtgagccaagatcatgcccctatgctccagcctgggtgacagagtaagactctgtctcaaaaaaaaaaaaaaaaaaatctggccatttccagaactctaaatcccaaatcccactatttctgcttgttcttcaacaaaacaagaaccaggacttgaggagctgagcaggaaaggaatcacagcatcttccatggacttccatcctgttcctgcctactgcctttccccttgtttgtgcagatagcatgctttttttccccatttctcagggtttttatatctaagctaagctctttatgtttatttgtaggacaccaagcaatttgaggcctatttaccctcaagtataactgccccaaagatcaagagaagaagaaagtcagatcatacaccaagtgtcttcaaaggctaaaacaccactattgtttcaagcataaggcacttggggtgaagttctccctaagtaaaacacatataatgttcccactgaattgaaatatatgtaggaccatcatcaaaagcatttaccagataacaatgtgcatgaagcactgtaccaggcacatctcagggtagccatgatgtcaatgaaccttagtggcaatcaaggccacttactagccctttgtgtgaaagagaaaaagatatccctccctctgggctggcacagactcacatcacactgcatggcttggccaagccaagtgtggctgccgttctgcacttactcaccccctgcagcccagccaacttgtgcagtgaagaatctgcaaaaatagttgcagccgtacagccctgggagaatttaaacttcatgcaaatgaaataaacatgcacatgaaattcaaccaggagatttacctggcaagtcaagagattaaaagggcatgaatatctgaatttttttatcagttacttgttttttaatctcttaaatgaaacagattctagaacttttgaaaaagggaaataagtgagtgtcacaccagaccaagagaggagaaaattaaatccaagctccaaccactcatcctaatctttgagatcactctgtcctggtgaacatgccttccgggtgggtggatacacagtctctttggagaaccaatttttttttgttgttgttgggagataaaaagcaatttacaagaagaattttttgtcaataaaatttctacaacggccaggcatggtggctcatgcctgtaatctcagcactttgggagggcgaggtgggcagatcacctggagtcaggagttcgagaccagcctgaccaacatgtagaaaccccatctctactaaaaatacaaaattagccaggcatggtggtgcatgcctgtaatcccagctactcaggagactgaggcaggagaatcacttgaacccaggaggaggtggaggttgcagtgagctgagatcacgccattgcactccagcgtggacaacaagagcgaaactccatatcaaaaaaaaaaaaaaattatacaccaaatggaaactttgaaaaaacattttcttttcttttttttcatcctaatagcccaaactaggtcatctttcctactccttaatagaatatgagtttccacaagctgcccagtcatactaatctgaaatttctcctgtcctatctcacagttcaatttcatgtttctccctcctgctgggacctggctactctgggccttccagtgggagtcctgatgccctggctcagtatgcttgtcattatagtcttctgtactatttgaatctgaagaataagcactgaatactaaattaattttttctgagcccatcagaaggacacagctcaagtgctcctatgactcttttggaggaatcaccagggctaagtccccagactctaacatgatcccctgcttccccttggactgaaatagctgcctgtcctgtccagccctgacctgtcctgttctgccctgccctctccagagaaagcacattctgtacgtcattactgagcgttctttttcagatcttatagacagtgaatatgaaagaagcattatggagaaggagatttattgtgattcattgaaatgtttttgatgctctacaattccctggttttgtccaagctgcaaatatttcaaagaacagatctccattatgctcataaacttacccattttataaaataacaacgataagttttctttatttaaaataggaaaagtcgtaccctcctcctgcagacagaaggcttgtgttctgcagtttacaggtaacaacgatgtggcttcacattcctcagcaacaatgttagaaaggcattgcagttgtctaggaatgccattgcaacccctagggcactgtgcatgaaatggctgaatagtaacattctggcagtcacgatattaagtttcactgggaatatcgtgacctgtgttctggggcagggaggttggcaggatgtgggggttagggggacccttttctccctctggccacattttgctttaatgcatgaaacaggaattaccatcaacacctgttggtattgagaaagcagtgctttcctttgctctagcattcattcattttccgtgagggccagaagagggaattatttgatccttgagaaaattctgatacggtttggctctatgtccccacccaaatctcatgttgaattgtaatccccagtgttagaggaggggcctggtggaatgtgattgcatcatgggggcgggatgtcccccttgcagttctcgtgatagacttctcagaagacttggttgttgaaagtgtgtaccagctcccccttctctctctcttcttcctgctccatccaagtgaagatgtgcctgcttccccttgccttccactatgattgtaagtttcctgaggcctccccagaagcagaagcctggacagcccgcagaaccatgagccaattaaacctcttttcttaataaaataccctgtctcaggtatgtctttatagcagtgtgagaatggactaatatttcaaatatttcattacacacccataacccagccatggtgctggcagcctctctcagtttcttgctgtcccactccttctctcctctgtgttctgcttgtttgaaccccactctccctcaccctgtctgtcttcctctctcctctcctgctttctatgcctttttttttctcttcttacctgtcttcctccccttttccactctccctccactctggccaccagcctgacagcacagatgtttttctgtcctccttgtttgaagccaccagggcaggtgctgctgctttgtttgtgactgaagaggtgagttcagcacagaggggaatggtgggcagcccagggaaaccgccaccagaacaaggggtaccattagcagagaggacattttgatcctcttctgacttccacgtctttatttccccatgggttcagaacccacagaaagatgaggcaggcattaagcctcttcaatacccaataactcccacagctaggaacagagtgcacaggacagaacagtgagtcaactgaccagagcaccaaggcagagagaggcgggatgcagacaggggttgagtgggagtgaaacctcatgagccaggcccagggacaagccacgaggagcatgcgcaccatggtccatgtcatagggacttccttaccttgcctttagaaaaaccaacaaaaaccttgtgtttaatgagattgaggcttgtctgcttctattcataagaccccaacatatgaaagccacaccccagaacaaggcagagtaggacgaagaccatataagactaagtgtggggtctgcaggaacaaagctcacatgagaagtcaacatgcacacacaaaaaaaaatcagaccagacgtgaatcgaggtcattctgtgagtgatattcattcatgagtttttaaccagactcttagtaagaaagaactggtaaatcatatccaaaacctttcatgtagtatccacagatgtcatttgtaattaggccttatcatgagcattcctagcattagtttcattttttttcaattagtgcctctgtaaagtcctaaattagagaacccctgcaggatttatcacagagagaaaacctagctgagtgaacacctgtgaatttactcagtccagagtggctaggccagaaagcagctcccctaacaggacagagccttcacaaggccagctcctgccccagaggcctctgggtagagtacccatacatcccagtttgcccaagtagtgctggttcacagccattgccctggtgttcatagcaccccctttcgttcttaaaaggccccaacttgcatgttcaatcagaaggtctctttggtatgcgctatataatggactatttataattcattagaggtgttgtaacaacatatcatcgactacattcaacagaatctctggaactaaggaaaaattagaaatgaaacttacttaaaaattatcttcatgaaatttgtgggaagataagcaatatataaggaaaggcaagaatacaaatcaacctagaagagaaggaagtaataagaagaaagaaaatgcaaacctgaccttaattttccatcattctcattaacgatgactgctaaaagctggtcagccacgctatttgaaagcaattttggaaattaatcctttaagaacattttttaacctttgattcatgagacaaatggcctttctattttaaccaagatacccagatagtgattagtcattactaaaacaaggatcccaaatctagttttgtgtatatgtgtgtgtgtgtgtgtgcgtgcgtgcatgcccacttgtgtgtaagagagagggagggagagagaaaatgagagagagagagggaaggagagagaaactgagagagagaaggcgattttagtaaatacacaaaatgagtgaattgtccctttccctttaaagccacccagggaacttagctgttcacattatcatcaacctgctgcatttctctccctaggagaccacaaaccaggagaaaccatatgtgagctcacaactctagcaaaagctttgttttcattgcatatgatttgattaaaatgatattgcagccttaaatttttttgtacagagttctagtgctgaactaacaggcaaaaattaaacaaggtcaagaagtgagctatcaggatctactctgtatccaccttaaacaaccaactccttcccaggttgcactacgcgaatggcctttgctgacgtcttctgaaacaggattagatatagccatgcagctgatgtaatattgtatcatcattcccatgacaggtacatggtggactttgtcacagcaagatgctgctccccgttcagtccgccatgtggtgattctctttctcctgtcaccatcgttgtgtccctaatttcccccagctccctttacccaatataatcggagatgcattaaacaactcagcctttttttcctagctgcacttgtcaacaatttcaacactgccctgtcacaatcctagactccaacctgggccttatatttttttatcttaattctctattgaaatataatatatgcacagaaagtacacaaatcataaaggcagtggattttcacaaagtgaacacagtcaggtaataaaatttaaaaaattagaacattgcaggaccctagaagcccacttatgttctatctcaggcaccttctcccctgaaatataaccaccattctgacttctaacaccagagctctgattctaagctttatgtaaatgaaatcatggcatgcactcttttgtatctggatgctttgatcaacattttattttttagattcatccatattgtatgtattgaagctcattcttctttattgctactgcgtgtttcattttgtcagtacaccaaacattagtgagttgtttgcatttttcaccattataaataatgctactatatgcatatgtctttcagtacagaaatgtacacatttccactggactataaaaacggaattgctaggctataggatattacataggttcagccttcgtagatactgaaaatggttttcatagatactgaatctacccatttacactctcaccagcagtctaggagcataccagctgccccaccgtctcacaacacacagcattgtcagtcttttttattttagccatcctgatggatgtcagatggtattgatgtggtactgtagatttcatttgcatttcctgctggctaatgaagttgagccaccctgctttcttaaggtttcaacttttaccaagccaatggccagtcctggcactcagctcctctctggttaccacctgcaaggaatgctgaggaaagaagcaagggtctgtacattctttccactcaaagccttcctgtctgttggcctttctcaatggtccaccaattgattccaaatcatgtctccatctcctgtacaggtcaccctggtggcagcctcttttctcctgcaatatccagtctgacacctgcttcccccttataaactattcttaagcttaccagatagccttacctcccacttgcaccaagacagacaagctcctgtagtgtgaaacctgcatgttcccttgcagcccttatttcattcttttcttcaggctcagaggaagcattgttcctcttctctaaaacctgtaatcactgagaaaatgtgttcttttgagtttcctttgacacgtactctctgtgtgaccaagtacaagttacttgacctctcccggactcaggtttcttccctggaaaattagaatatttcttacctcttaaaattgttgtgagacttaaaggataatgtgcttaaaatccctggttcaatgcctggtagatattttgtgcttagtaaatattaaactctttccttccatttctccttttatctctccattattaatctcctcctttgccttagaggcagtgagatggaaaaaaacttggcgttcacaatcagacacaccgcaatttgaaaccttatgtttaccattgactagctcaattattaactcccctacgtcagtttcttcaactctaaagtggaactgtgggtgttacactcagaaccgtgaaaatacaagtcactccggctgactgcaattctagattagctgtctcagactggtggcccacgggccatacccgtcctgtgttgaggttcatttggttggttgttggtttttacttaaattgtctagagttaaatattaggataatttacattacatttcaaaatgcgggcatcttttgaaaaaactagatctagcaaaagtggtcacatttcctcacggcaacaatcaccatgaggagctggccatgtactctctggtcagccacactcccctgcccctctattctcttccaaccaggctagtctccttcatttactctacgtgtatagaccttgatgggttttctattatgtttagttgctacctctttctctagagtcttattgaactcaatgatgacttgcctgagagttgcaaaccacttctaaaatgtttaatatcacttattttacaaatatagactacctgatctccagattcttacagcttacaactgtcaggctcttcagaaagctcctatattggtttcctgttgctattgtaactacctaatggaaaacctagtgagaaaagaatagaaatttatgatcttacagttatggatatcagaggccaagaagggatctttttggcctaatcaacagggctgcattagtttctgggaggctccagaggagaatctattttcctgctttttctggcttccaagggccgtccttattccttggctcatggccccttcctctgtcttcaaagccagcaatgactgggtgatgcttgactttctcatgctgcgtcactctgacacttactctattgcctcattcttccatcttgaggacccttgtgattacactgggcccacccagataatccagggtaatctccccatctcatattcagttgattgatgaacttattccccccttgtcaaaatatattcatgggttccagagacatttttgagtggctgttattgtgactaccacagccctcaacactgtcaccaagccttcctttccttgaaagatacaggtgagccaggattgctgatttatccaatagtgctgctacacattttccttcagttcaaaaacaatcccccaaaatgacaactgagtgttggcatcataatgttgtatgggaaagcagttttctcctacatgcctataaattccaatggacactttttgccatctctctccccccaaaaaaacaccatcaacattttgaattgttagaaagaagggaggagaaaaaggagagcaaaaaagaatggcactagctacagtttcaggtgcaaatcctcttggggattctttaaaaagaagaaatactgaggagcatatcaaagaaacgtttatattgcctagggtactctaagccctcagcaaagctccgaagaataattcggtctgagagtaatcctgaactactgaagtcgcccatgaatattccaccatgttctgttctctattcaacagtgctttcataaattgctccagggaaggtcatctcacttatccacaacaccatcagaattaaacaggaaacagcaaacagaatagagcaagcacaggtcacgtaagatactatcatatctcttctccaaatagatcatcagggcattgttcccagttcaaaagggaaaaaagatgataaattaaatccaatcctgaaatatctgtaatgagctaggatccagacttcatttgctacttcataattttaagtaagaaatctttcatgttatataatatgcttaaaaatcggtgaaatatgcacatatacatatatatgtatacgtatattttttttctttataacctttagggaattttacagtgcaacaaataaatgctaaatatattattgcatgttttaatttctatcccagttcatttcttaagtcatagacaaagttagctaggtaatctggttctagctctgaaggtgggcaacatggccaaccttgccctccttcttgaaacctttccaatctttctggaatcagcttctttaatcagagtcttgttctttctacttctaaactttctcaaatattcctcattgtctacatttcctagaattcatttttataacacatcacagctttaaatcattatcagggtaaatttttgtttaccctatgaggacagggacatatctgtctctttctccccagctacagccctgtgcttctgcatagctggctctcaaacattgttgaatgaatgaatgctccctacccctatttgtctttttggcatgccttatttgtaccaggcactattttaagtgttttgcatatattaatataattcttataaccaattttattatgtagggatcattattttacagataagaaaatgggcatagaaaggttcagtaattttcacatacaacagttagtaacagatatcatttattgagtacttaatttgtgccaggcagggctgccattagctacccaaagtgactatgtgtaaatttgaaaaagatgccccttttacatggataaattacaaaaggagtctcttccctaggcacagggcttatcagtgaaagccagttcctacctgtactggcccctcaaccatgagcatttttggagggcacaggctacacaaaatacagtgtatctaatatcatttcttttataatatactaccagctgggcatggtggctcatgcctgtaatcccagcactttgggaggctaaggtgggcagatcatgaggtcaagagattgagaccatcctggccaacatggtgaaacctcatctctactaaaaatacaacaattagctgggtgtggtggtacgcgcctgtagtcccagctacttgggaggctgaggcaggagaatcacttgaacctgggaggcggaggttgcagtgagctgagatcgcgccactgcactccagcctggtgacaaagcaagactccatctaaacatacgtatatatatctcctgattcccagatttttacagcttacaactgtcaggcctcgtcagaaagtcctgtattagtttcttattgctgcttaacaaattgtcaccaatttagtaacttgaagcaatacaaatttattatcttatagttatgaatatcagagtcccagaatgggccacaaactgctctgagcactaaatggtgataaacccacagcaaccctatgagataagcatcattgttatcatcatccttatttaacagaagcaaaaaacaaaggccagagaagaaaagtaatggctcagagcttcccagctattgagtgacacaggtaagactaagcccaaacattgtggccccagagctcacactcccagcattactctatagtgaactgtttagccggggttcctgtaacagcctcctactccctagtctccaggcctcctaacgcatcccacacttcaatctactacagaagccacagcgaatttccaaagatatcaatctgctcatatgtccttcatgtttaaaacactcagtagctcttccattcccctccaggtaaagtcaagacacttgcctgtggttgaataggctctggtgatgtgatcctggtcactcttcatcggcatctctggtccttccctctgcctctacccctcactgcacacaatgacataaccatagcaaacattctgctcaatacattctcccattcccacttgtcccaggccttagcaagtgatgttctttccacctggaaactttctcttccgcctctttgttgactatctccaaatgataagtctcagcctaaatgtctcaacctctgatccatggtccttcaacactcagtctaaattggaacccttgatagagcctttcatcacaacttgtgttttcctttatagcaacatcgtacgtatgcatgtatgtaattattcagtcaacactgactttcaccaatagtaagtttcacgatggcaaggacagtgtctattttgttagttaactgtaaactcagcttttagcacacttcctggtaaacacaggcaaccaaatattgtccatgtgcctcctgtgagctcactgtgcttctcgcctatagcattcctcacaatacagtttattgtcactgcctatttctgtattccccattagatttcactattttacacactatgaggacaaagactatatctgacttggacctcactactgaacccccagtatctagcacagagtcagcatatcgtggacactcaaacattccagaataaatgaataaacaagcataaacaactggcccatttggggtaacaatcctctttattactactgccataaatcagatcaagggattgaaggattgttctactttaaccactttaaaggaatagaatctatttagaacattgagagaaagctatcagcttcaaattctgaccaaatattgtttattagccaaaacagacaacagggccaactcaggcctcgataagaaacaatccatgagtttagtcaaagatctcatgagtgaccactcagacagaaaatttggcatctacctgccaactcctacagaaaccaagagccaagaactgcaaagaatgatcccagaggtaactgactgactgactgtacctaccagtagtcattatattactccccgttaaaggcttaaagggaggtcttgaagacaaaaatttataattaaatgacgtttcatcatgctgaaaggagaaaaagatatattcaaatggaaaaaaaagcaaaggcaaagtaaaatatattaacaggatctgatgagactacagatgaaaaacaattcctgaaaaagatgatccatcttctcaatgggaaatacataggtcttttctacacatagtatttaaatgaagacaacattaatgtctctttctgacctggctccagaaagtctgctcactcttggaagtgatgactacatcctttgagtgctagaatagaactatattgttttgtccaatgggtgaatcataattgcccagttggatatgaaggaattttagagcaatcttggagcgcataaatatgaagcaagaacagttctgttatggtaatgatagtaatcccaaaatgccacaaatacactggtatttcaataaattaataagaatatttcatggtgacatgaatgcccttgtgtcttcccactagtaaaggggacacatgttgggttgatcaaacttcatcttctctataatttaaaaccctttccaaccacagtgcaattagctccatactctactcctaataccaggattccgaacataaggatccaagtttacctacttaatttaccttcgttcaatatcctctaatcacctttgccatgtttttcaacatctcattagtgctgaaattaataccttaatatgagtgacacaaattttgctctgtttggcttattccctcagtaatctaggaaccagcccccttgacacaaaatagaaacataagtaaaatacttttaaaagaaaaaaaagggccaggcatggtggctcatacctgtaatcccagcactttgggaggccaaggtgggtggatcacgatgtcaggagttcaagaccagcctgaccaacatggtgaaaccccatctctactaaaaatacaaaaattagccagggcatggtggtgcccatctgtaatcccagctactcaggaggctgaggcaggagaatcacttgaacccggaaggcagagattgcagtgagcctagagagcaccactgcactccagcctgggcgacagagcgacactccgactcaaaaactaaaaagaaaaagaaagaaagaaagagagagagagagagaaagaaagaaagaaagaaagcagtatgttgctgacaacatgcacagtggttccacttgctttaaagctgttatgccaaatttgactgagcatttactccccacactgaagcacctcccaggcagcaataaaggtcctacatacatggttaccctgccttggacaatcaaagccctattgcatgcctttctgctcttaactattgtgtgcctgctaataggcaatgctccctattggcactgaatttggaagaaatttcttgtggagcagtttttaaaactgtaaccaggaaaagaaaaaaaaaaaaacattaaaaccaatcaaccaaagaagtcgttttggctatttgctgcattgccagggactagtttttatttttagaaacactttcatgaaacagagctttaggtatttttaccaagtatagctgatccagttacttttcttcattcttatttccggtatatttttagccgcaagagttactttctctggtaaaagaggtgctgtcccaaaaataaataaaacttgggtggacaaaaaggacatggtccacaggtctattcttgggaagtgcaaagcagctctgaggacccaatctcatgaagctgtcctcagccacagacatctaaaggatgcagaggagctagttgacttggtagcccagcacttgaaaatttctagaaagcagaaccaaaatagcatttttctcctgctgccctacaataatgtccatgcatatgatctttgtggggcctacaggttctttgtaggaagtcttttagtaaacaaaaccccagaagaaaagcccccaccacactactcagtgctttaatgagattagaaaaagacacctctttctcctcatcccatctcaggacttggcttgtgagcaaagcatggactgggtttcagcctcccttcacccccttggcctgacgtctcactgtcattgaatagcacctggatttctttgaaacactgggacaatacttcttcttacattaattgattacatgtttcagccatgaccacaggtaaggtacctgggctctggagaattcaaaggtgaatgaaatggtaactatcttcaaaaaagagccctcaatctcagtgaaagtatgagcaaaggtataaaaggtgctaagataaaatgtgcccgatgctggttaattttatggtttcacttgcgtataggaaagtcatgggtgattgagcttaaaaatgagcttacgtgactaatcaagagaagaccatgatacggcagttatagagaacagaaatggtttgtcaacactgaactttgaggatgtgaacttagtgatggtcagcaggatagattagtgtatcctagctggcctctctgcttccagcctctttagatactctaatgatcatttaacacagaggctagctaggaagttgatagattatattactgctcaaacattccaagggaatagtatacatccctaatccaataacctcaggctgggatgtgtcacttactttagacaataaaatgggaatacatagtatatgcaccactttcaagcaaaattttaagagccattttatggttctataatacgctcttttctttttgccccaatgtcccgatcagggctgttccttcagtcggggtcccagaatgattatactttggagcagagctgcagtcaactcataatagacaaacggcagcatcaagaaataactctcttgttttagcaagtgataccaatttggagattgtttgttagcgcagcgtaacatcctaagttcactgatatgggaagctagtgcaccttgaaggtgaacacaataaggtcttaggctaaacataagaagtgatattggatagaaaagggcagagataataaaaatcacaacaacgagaaatcgacatcacttagtatttatgtgtccagcagtatgttaatcacatctcatttaatcgtctcaaaggcagaactcaaacacatatctaacaccacagtatgtgctctgaattttcccagtaaccaacaaagcttggtgatttttcgtgcatgtgtagtaagattaactcagcaaatctaggtggctcaagccctgcacatgcccaagaaaaacctctcttcaagactgaacttaggccagctcctgagagtaagccttgagccacaggtatattctgcctggtaagagtgttgtatgcctcaggccttggagcatgtggtaccagtttgatcagatagtttatgctaacaatgtgatgcatgatggctgcctgttccttctctgaggagctgaagtctgagtagctgaggtaagtcatacaggtgctgcatgactatgtggctggcctccattaaaaacatcaaagctcaagtgtttccctggttgacaacactttgcatatgtcacacggtattgcttgcagaattaagtgcatctgtgcaattctactggaaaaaaacttttagaagcttgcacctaatttctcctggacttttccccacatatcttttgcttttcagattttagtctgtattctttcactaagtaaaacataattgtgactataacaacttttctgagtcccatgcatccttttagcaagtctgagggtggccttgggaacccctgatacagtagtgtacatgagacaggttaatgtcaaagatgacaccaaatttccaaggccaggtgattcagaaaatggtagtttagtgaacagatacgggaaagtcagaaggaactggtgagctgggagggtgggtaaagaaagaagccgaggaagcaagtggaggatggaaggtaaatttggtagctgacattcaatttgacttccatatccaggtaggaacatccaatgggcaatagaaaatgtacaactggaatctgtgatgaaagcccagaatgggaatatagttaatggttaaaaccatgagaatgaataaggcactgaggaaaagattagagaaaaaaacagcaaggagttgaacacaaactgtgaaggatgaaacttggctgtctacatatgaaaaaacaatgagaaggaaaacaaattttacctattttcaattcatcatgaaagattctgtttaattttatatattaagctagttatactgtatacttttcacaggaaatatttgctaaagagttttttcttgatactaaataacattttaaaatcagctgtatttatttcctcattgaagcctcattttaagggcatttagaagtttgtcttatgagcaaaatattcagatgtaattatgataagcattgaaatatatatatatttatatatgaaatagtttggagttatttccaaataaactggggcagagaaaagccccagtcattcctgatgctacttcatgtatctatgtggctaacaccaggtctatttctatatgtttatttgcggttttagctaccccaaaaattagggtcaaaagaaagataacaataaagtcagtcaaggtcctatggggtttcatttcacttaacacatttctatttttctgcattttctttaaatggcaaacagagctagacaccaagagcatcggactcaactcaagccactcacttttgtttctgcttcctccagaggtgattttttaaaaatattctcatgtgcttttagacttttattcttctatggaagaacatgtttgatcatttcagaaactcctttaaataatgttgctgtcaaaatcagagtttctggctgacttcccccatttcaccggaagaggcagccccccaagtttatgacctcaggtacttcttactgaagttttagaaaatactggatctgccttcacttttcgttttcattttcttagccctactcttttgtgtgagagaatacatgtttatggctatctttcaaagagatttatgaattggttctagggctgcatatgagacagtgagcgctagggaagtcagttctacagccagttgcaccctgctacacttccttcaatgaagagttccagtccatcatcttagggtcaagttgttgagaaagtcttcaaagtgtaacattcaaactagtgtctcaaaagctcccccatgtgtgcgcatgaaaaataactcatcaagggaaagtttcactggagtacatgcagaataagaacagggaccaattttcagatctaaaaaatgtaagatacaagaaaacaccacattctataattatcattttatttacatgtgtcatgtttaacatctaaaagaataattaggtgggctgttttgtacagattataacattagcaaatgaaatgaatgcactaaaaacaattatttttctgtaaaaggtatgaaaaaacagggcaaaaaaatgaaaaacacttggaatttttccaaccataagtatactcaaaaaagaaatgataagccctctgaatatagtaactgatttatgttttagcccaagaaatgaattctatgaaaataaaccaaccaaaacattagttgtactttccagaaagcaattgcctaatggaaatgccttccatttctccttttagcccatttatctttcccttaggggaaaacacactacagctaagactactgtgtaaatcagctacttccaagcaaaaggtgtgcttcccagaatattaaaactaaggctggcttgaaagatgttctattctaacctccctcttttataggtgaagaatgtgaactcagagaggtgaatggacttgtcccagttcagagagttggcggaaaatttgagagcagaaccctaatctgttttatagttcaatcattatcactttatactattctgcctcccagtttttagtaatagtaacaaattataaatagaaaaaatactaacaaatatttctaacgctaaaatgtgctgatcatttactctgtgccatttaaaatgcctttaaatacattatatgaattagctcatttggtactaagaattaacttctgaaaaaaagttgtattctctccattttacagatgaggaaatcaaggcacagagaagcacagtacctacccagggatcttaaagagtaagtgttgaagctactgtaatagctaagcagtctaactctacagaccagattcttaaccacaaataactaaatagtataaagaaaatagaattgttattcaaaattcaaaggggcatcagctatggtattaaatcttatcttttggcaacataaaattgaaacctgtgataattcaaacagaaatagggaccaacttgaaactaaaaaacagcaactagcttaaaagaaaaacccttacctaattaggtgaacaaacttgaagctttccaagtactgaacttcatacaaatcatacaaatagaggggcagcatttttcagtatggtaacgcaaatcatgccaccctataattagaaattattcttacctattcattaaagcaatccctgtcctaggcaattattggttagcctagttttcaagtaataaaactaaatgtcttaagtggaggtaatctctactacttttctaattgatccaaattagtatgaacttcttaaataaacaatgaccactcaacttccaaatccaatgggagcctgaagtctgaccttgccaagcctctctgcagtctttgactctgtttgcttcctctctcctcctgacatgatttcctttcttggcttctacgacatcactcccctggcccttgcctggtgctacagatcactccttcactgtagcaagttcctcctcatctatttgattgttaaaggttggtactcccagaagtttgtttctgttgggttcttcctactccccatccccacactcagcttgagtgaccacagccacacccacttcttctactactactcaggggctgatgctcagcttccaaactggggtgtcgcaactagtcctcttccccaatgcctacactgtccatggaaatacctcaaattcagcataatcaaatccaaatcccacacatttcaccaaaaatcctattcctcttcttgtattccttattttgcttaatggatcccaccagtcaacaaacctaaaccttgaatcatcgaaaagtccttccctgtctcccagaatacatacagcttggccataattgcaacgaactgtgctttctaaattgaaccagagtcttccactctctcttgcattctcatgaaaatcatccagactccgccttcattgccactgttcctccacaagccaaaaacctgtcccagattggattccaccagaagtagagcctgagctaagaatttaagcatgagtagtttttcgagaagggattccaggaagcaaaatgtaggagggtatggaagaatggcaagtatgggaaggaacaatactggtgtgtaaatgaccagacaactgctgtgatcaggtgagactcaatgtcaccgggaacctccaagatattatacaaaacctgctgcagactcatcctcaccaggggtgaagaatctgagctattcatgcatcattgtctgagcgatgctctcaaggatgttaacttctggtgctttgggcctgcctcattacagtcttgcaaacttgtagtctctgagacttgtagctgttgtcttgtacagtaacagtgactgccaagggaatatgagaggggcactggcaacacttgccacagaaaccttccaaggctctcataaaatccaagtgcctctggtgcagcctgcaagtcattccatgacctgtgtcctactttcttctccagcatcatttctcagtctttctggtctaatatttatgtgctataatcctatcaacctactaacggtccccaagtccataatgctattgccacctctgttttgtacttactactcccccttctcagaatgtccacctctgtctcccaatcctattttcatctacctggaatacaccaactttttaggaagatacagctctcagatctctttctctctcaagagccttccctcaattccttgtaccctagctgggcacttccacctgtgccactgccctgccttctgtctctctcatcaaattgcacagtagttgtttgtgcacatggctacaccaggctgccagagtgtgaattcccaacaagaaaggactctgcataatttgtctctgtttccccagcaccaagcccaatgcaaaaaaaagaggaaaaattaaataataataattcctgagttatatattatacaaaataaataataaatctgtaattaaaatggcaaacaacagccagaccaaggaaactttggaaaaaaatatatagtaattttccctttagtacgtgctttaaaaaaaaatgactaattaggaattttgctttctctacctatgagctataaatcaatttttttcactctgcttcagcttctcaagctgtgtgcctctttattagcagtgatttccttaaagggaatcaaatgcttaagagcccctaataaatccttatggatttaatacattcatggatattttgtgaccacatttcaacctctctaactcagagtctcttctatgtgcctgacagtgagctgccttcacattgaacccaattagatactcctaaaaggaagaaacacgtgttgtaattgccctcctaagactctttgcaggcccctctaggtcacttgcttccgttcctctgcaggggggttctgccagctccagcactgatgggcagaaagccagtgcagcattgggcaggggcagccctgcgcatgaactttcactggatccatcacaagcaatgcatttatatgcaaatatacccaaacctgaataatgattaaattcggattctgggaacttcctggagacaaaagaggatgaaaaaggagaaagaagtaatgaactgtatatctaaaggcttctagttcaaaactgacttgatgtacattgatgtgaaagctaaacatatggtagatatctttgatctgggatctgtgacacagtttgtgcttggcatctgttgtttgtgattttgtgatgcattgatcactgtcaccatgtctgatagaaactaaattgccttcagtccatgcagacgtgattgctgcttttactctcctgcccatttgcatccttatagtttcccaatgggaaagaaaaataaccacagtggatcaggttttaacattgggtgttgcctctcatcacctgtgttttggatttgccctggccaacactaggattctttcatctgagatgataaaaatctaccaatgcagtaacaaggacaaggtgatctgttacagaaaaagcaaagaaggaaacttggaacgtcctgctcataagtcaggtctgcagttcatgttttatttcacatttgcagacccactgcaggcagccaaggagttgctatttgaaatgttttgctgacctcataagaaacaatgtaaatagactttgtatcccaatgacgtcaatgttagagccagtatccatgttcttttctattttgtgagacttttgtgtatattgtttccaactccctgtgctcaccagcagtgtgttctgttttggtgtaaactgataccaatctttgcgtgttaccatttctcctagttcccctacactgactataaaatgaaggataacagagggtaaaatgtaacatgggtgacaggggcagagatgcctgtactgaccccctctttccactcctataccctttggtgctttttccctggggaccttgttctagggttgttttatggacaaaactttgcccttaaaggtctgggcttctgtgtcaggaaaagctctctcaaaccgtgtttttcctctactctcacgccaccacaacaacagtcatcaacacagaagaagccttctgttacccgaagtgtggagttttgcccccacacatcaagcagtggacaccaactgggggtcctctaattcaattctgccactatctacctggagatagcatcagatcccataggttgagggctcagtcccaaagatgcttccacctgtagacaccagtcagaagtctggtgtcttttgaccaaccaacttcaagttggggtttccatgaccccttctttgggtttgattaactggaattggaagcagctcacagaactcaggggaacacttttacccttaccagtttattataaagtatattacaaaggatacagatgtgtagggtgaggtatgagggaagatgcatgagcttctgcgtcctccgtagatgcaccaccctccaagaaccttcacgtgttcagctatctggaagctccccaaacccaatcctcttgggttgttatggaggcttcattacataaacatgattgacaaccctgtagaaatgtgattggacaaaaagtgcatgatctaaacccatcaatgcctatctactcagacttttcttggcctctctgtgtagcattcattcctcttaggtatagagcaggactctttctggaatgagggtattttggttttttggggttttttctttattttttctaaaaaaaaaatgggataaatatgcagaacgtgcaggtttgttacacaggtatacatgtgccatggtggtttgctgcacctattgacccatcctctaagttccctcccctcactggtgtatattgttcccctctctgtgtccatgtgttctcagtgttcaactcccacttgtgagtgagaacatgcggtgcttggttttctgtttctgtgttagtttgctgaggatgatggcttccagcttcatccatgtgcctgcataggacaggatctggaatgagggtattttgaccgacaatcagattagagtcctgccttgggcaagtgaaaggaggacaggagaaggttagagggaaagattccgtttcctgaggcctaaagtgccccaacattataacaaggattatgggagctagaagccaggaaccatggatgaaaacaagtatctatatcataacaccacagcgacctaattaagtaatccattatcaataacgacagctaaaaattcaacaaatattcattgtgtacctcttatgggcaagttatggcttttctaagcatattcacttcttttttcttttttttaatttcaacattcctttgaggaaagaaaggacagaattttaatccacattttgccatccaagaaattatgatatagaatatcatatagatatagaatatgatatagagaggttttacactttatctccaatcaaagagcaaatctatgaaaggattggaataaaatacaagtctaacaatagaaagtccagtgtcttctccctcttccttccctaagcttacaccaaattgcactttataacacagtagtgagaagaaattctgaccacagaggttctcagcttggagtctatgcccatggatggatgtagaaggtattcagactcttgaaactgtattcaaaaggttggcatatgtgcatttttcgaaggagagaataaaaaaactctaaatgattaaaaaattttaatcatatgatttatattttatatacttgaataacaaagcaacctcaatattgcatgaaacctggtatttctctttcctagtcacctaaaatgcaccctgttacaatcgttcacatataacaagctaccttaaaacttagtagctgaaagtaacaacagtgatttcattttctcacaaatctacaatttggggaaggctcagaaggcacagctcatctctgtgccatgtaatgtcggctggaattgcttgacaggctgaaggatctgcttcaaagatgactctcacacatggctgactgcagtttcctctccatacgggcctttctatgggcttcttcacaacatgttggctgggttctgggagcaagcctctcaggatacacaaagtagaagcgacccatttctgaaggtctgcaccagaaactgacacctctaccccatcccattggtcaagcagtcacaagaggatacaaggggaagagacatagaccccatttcttgatggaaggagtgtcaaaggattttgaggccatgttttaaagctgccatatccctctggaggcatcttatttcttcctttggtttactccattactattctctctcgctctcatagatctttgccatgttagaaaccaagctctagcatccctcctatttcccacttcccggggcaagtgtgtggctgttgcagcctactgctgccaattggctggcccttctacctacatctctctacttcttagctctgggtgtccaacccatgcaacttcctcccttcctcccctgctggagtcacatgaggagctctgtgcagcctgcttgtttaaagaaatgctagccaatagctttagggggatagtggtggtgacttctgtctaaaggcagagagatcaaagttattctgcagtagtatattaaatacgagccacgtgcagcaagaaaaagaggccaacctttgccaacagtactctgtgacctctggttgagtttagcgcaaccccaattctgcctgtttccagtcactaaccaaattccttaccctttgaaaagtaagaggtattcaacattcaaggaaatgccaaccaggacttacattgtttgcatcactttcccccattctccttattaattaaaatgactgatccataaaattggttatcagcactgaaacactctctgatactctctgcctccagctcccttaggctgccctttggaaatggtctgctttttctctgcagtagaaatgataatttaaaaaaaaaaaaaaaacaagaaccaccagctgaggagaaaatctccaaggcttggcctgagggggaatataagctactattaaaaaaatcaacctggcaccttggaagttttacctacattctcacctattcaccatctcccatccctcccgtgccaggaaccctctgccctcagagcctttgcatttcctttgcttgggatagaaagtcactggctgtttcttccttcctaaaagaagtcctcgggtctttatttacatatcaccttctcagtgaacctgccctagaagccccatctaaaatttacaaacctaatataaacatgcacacatatacacatgcatattcacacacacacactgcttcctatcactgttacctcctcacagtttcctcatcacttatcgctatctaatatatgatgcattttacttatttattatctttccccttctacaatgatagcttcatgaaggcaagattttttatgtcttgtttactgtttggcctagaacagtgacttgtaccaagtagatgtgcaataaatgtttattaataaataattgaataaatgattgatctaacctataacatccccacatggtgatcacagggggctcccagtcacactgtctgctctgaaggtagatagctataaatcaggctctaacagccaccccgcagattagtttcctactgctactttaacaaattaccattagtggcataaaacaacaaaagtttatcatgccacagttccataggacagaagtcctatgagtctcagtgggctaaaaccaagaggttcatagggctgagtttctttctggatgctctaggggaaattctctttcctcgccttttccagctctagagatcatccacattctgtggcttgtggcccttttttccatttttaaagaacgcaatgttatatccctctgactactgccccttagtttccttagtcacaattccctctcttttcctgcctaccttttaaaatattgaattgggcccaccaggataatccaggataatctccctattataagatcatctgattagtaatcttaattccatccacaatcttaactctcctttgtcctataacgtattcaaagattccagagatgagaacataaacctctttgggggccattattctgctcacatcatcctcttgagcaacctaagaagtgataaggcctctctcatcaatttgatagctgtgatgttccatgtttagcccttacctttagtccttgttgaggtatagtacaaacttccctggattgaaaggcagaagatatttcattcaagacccttctgaaactgttggttttataacctgggatgactaactcaatcacaattactgagactccatattttcaacagaaaagtagagttaataaaacctactgacaggactattataaaatgaattgtggagaaatctttttatagaactttcatacttcacacagtgtaaggaatcattgtgaatagagatctctaggaccaaagataccctgagtttgtactgatggtttttattgttttgctcctcaaaataaagtaccacattatcacttgcaagtttgaacaaattacaaactgaaattggcaatgtcacactcagtccaagtcctataataccattacatgatttactgatgacaatattgtacagacaatccaactgtgaatatgatttttgttttttctagttgaagtttcttcatttatttgtcctcagaaaaacgacattgagaaacaggtaagcctcacctctttcatttggtagtgtgagaaacaatgactgtagttaattgtatatttccttctaggctccctcaggaagaaaaatgtgcctcattcacttttgtaactctggtgcccagattcttgcctggcagagatactcaatgaatatttgttgaagtaattaataagctaatacaccaatatttaattagagatgcacattaggaaattgtccatgctgctgctatgtagctataaatccctttccatcttcattttctagccttttgttaatcccaccctgaaattcccaatatcaaggggaaactggcctttgcctgacctctggaaagccatttaaaaaaaaatttaagcaaaatttctttaaatggggaacaccgtactccagttcatgcttccagttaccactctcatgatcaaacatttcttcctagagttcccctaagaaggataccacagggaagattgtaaacttcttattcaagtaaaagaggtgaagatgtgcaacacatttaaacgggttcttcccctaaggaaggtgtaactattgcttctacagggagccagggaagatttccttgaggctgaaaaatatgcccagtaaacaaagctttgattgtgaaacttcaagtctctgatggactttttttgaaggaaagcttataacagaggggtcagtcaatgacacaccaccagatatgttcaaataaatcaaatgcttataccaattccacaacctgcttttgtgagcctcaagacacaaccaacttaaacctccataaggtggatgtgtcacacatcggaacaacttcataggaaaacagtgagaactgggcccttactgatttcacattgcctgatttgccaagagaggagaaaggcttttctaagccaagagagtctttaagcatcgcacattgtgtccaatacttgaggtgtgacagtaagggtctaagaggaaataagtttcttttttcctttttttccccttgaagctgcaagatttatgaagaagaaccttcaagttttatgaaaaagaactctataagtagcctactacaaataaaaaacactaccaatttaatcaagaagttcaaggaataagatatgtttgtattgcatttcacttaaaatactcttcaatttaaaaggaggacttggcaatgtgaattttgccagcaacaaaaaattcaaattcaacaaccaattccacaataatcattttgccacactcacagcaaatatccctggattcactcaaacttaatactgcaaaggtagcacttaaaactcttttcactttaggtacccactgaacactgaggtggccagagtaagtaataaactcttggtgataatgaatggctagtccatttttctttgccaacatacaatagattctggtgtggaagaaaatagtttcacagtaaaacactaatttaactctcttagggtactaatctatgtgttgaaaaagaggtttcattgaatgttttcctgagttatattccaattatctacagatttacctaaattttctaaatccatgtgtattttctactaatataacctcttattttttgcagcttaagtgctcaataaagctctaattagcaaaagatgaaatatgtttcagtcatctggatttttattcaatcttatttacatgaattcaaatctatattctccccaaaatttcgacaaaattcacctttgtcaagtaggtctgtcctatacttttaacatgaagactccaaaatatgcacacaaactaacacatacaaagaattttttggcacaaatgctaatttttcctacacaaggtcaccgttaatgaactgctttcaagaatatgtaaaaagagtggagaacaatatattttaaattatagtggcagctcttgcctccttttaaagttttctccccataacttgggtttgtagcactgaaatggggataagaatgctcacagttattgtaaagttaatttaggaattgtgtttttatgaagaactttgaactcgaggtttgatatgttgaaaataaaatgtatacatttcaattgcctatcgatttgtctatattttctgaatccatttgtattttccactaatataacattttatttactgcagttttaagagctaaacagaactctaatcaacaaaagctaagtttcatcatctagacttttatcctattttattgacttcaactcaaatctgtgacctccaaaattttccttagtaaattcaggtaatcactcagtacaaatgaagtaaagactttcagttaccagatactaaattacaatttataacttgtcttgtctatttacatatgtttaagatctttcttcagggatggagcagcagtaatgacattactttggcagagctcatgaatctacattaatatcctctcatctggggttttccacatcttgctccggtacaaacattttcttgatggcaagaaccaaaactcagcaacccaaggaattcttgcagagaaatattagctgtctcacattttcgccttcagggtagttccaagagctaatgtctaaggctatactaatactcctaaagtgacccacccgagcctagattttcttcaaatggctcggtcccaagaccttcctcatgctccatcttaatgtacaggtgcggtgggattctcttaaaccaaatccaattcaacaaagaggtgatgctgagttgcataaaccacccccctccaccactgagttacaaaaataatcgtaccagcagaaatctgacagcctccatctgctgaataacttgttgaaaaccaatcaaccagagaccactaattattctgaggtctttttaaaatgtaaggttttttttttaatttctggaaacttgactgctattatttaagatggcccattcaacaacaatggttcataattatatctatttattttgacagtccatagctcctgataaaaggccatctgcaacattttcaaattaaggattttttcctacaaagaacattattattaacaatgtgaaatattgaagctttggaagggaagtgtaatcaaagaccacaacataaaattccattatcacagtgtctggttttgcctctgctttttcaatttaaagaggaagaactagaagtaaatgtaataagtagtgaggcagaaaggatgagggaaaggaattgctgagttagactgaaaacatctcaaaagcaaagattacgccttttatttctctttctttttcaaaatacaatgcataatctacactgtgttctgttaataaagggtgccaagatagaagaaaaaaaaaaaaagcaaacaagccaaactccccttcagaactcctccctccccgctctgcatctctctaccttgcttaggtgcccattccatgagttgtttgagccccctaaccaatatcacaccgcttaagcctgcccattaccaccaccaggggaccatgtagagtggtccaggttgtttaccacacaaaggtactccgctcaagcaggcatgtgatagctaaaacccagcccacggttaccaagagaatcagctactagtgcccagctggaacagcctccttggttgttttgtgggcttctttgagaataccaagctgtgtgcactggtacagggctacatccacccaaagggggcactgctcttttctgttttgcataaaataacagctttatccactgcgcatgttcccaaattttcacactcactcttcccacaaaggagcagatatgttaaaatagatgatcctgagagtttattattagacaacattttgcagatggtggagtctaatgagaggagtaaaaataagaaaagcctcctgtgtcttcctttatgaagtcaggaaggtgaactgggttgggctgctgccacctgggaaagaccctgccacatatttctttggcttcttcccttattttcttacgggtcttcttctcatggggctagaaggaaagtcaaaccagggattaccccatctgagaagacctgttccctctctctctggttctatattaacttttaactccttttttttattcttttctctttttagagacagggtcttgctctgttgtcgaggctagagtgcagtagtgtgatcatagttcactgcagcctcaaactcctgggctcaagggatcctgcctcaagggagcctgcctcagcctcgtgagtagatgggacttcaggtgaaagccaccataacaggtctgactcctattcaaggctggagattttgcccccagacagagaagacccagagttaggtatctatgccagcttggccttagacaacaggtagatctgtgtttccttagtcttaggcttgcttctgctgacttgctggccgacttatcccaggcagacctttcctttccttgaaaattaaagccttcaacagccaaattcagacgtggacctcaaggtaggttgggaattgtatggaaacaaagacgaacactaggtcattctgactcttagcccattttccggcctcacaaaagaaattcttcacgtggtccaatgcaaatttttaggatcccacatttactactagcactcacagtatttttaaatgtgcatttcccttacaaattaaaactgcaatgagctatcacctcatatctgttaaaacagctatcatcaaaagacaaaagttagcaagtgttagcaagaatatggaaaaaagggaacatctgcacactgttcatgggaatgtaaattagtgcagccattatgggaagcaatatggaggtttctcaaaaaattaaaaatagaactaccatatgatccaggaatcccatgactaggtagatttctaaaggaaatgaaatcattttgaagagatagctacactcccatgttcattgcagcattattcacaatagccaagatatggaatcaacctaagtttccatcaatggatgaatggtaaataaaatatggtatatatacacaatggaatcctgttcagccttaaaagaaggaaatcatgtcatgtgcaacaacattactgaatctggaggacatcatattaagtgaaataagccaagcacagaaaaacaaacactataccacatggtttcactcatatgtgaaaattttaaaagtcaaacctacaaaagcagagagtagaatggtgtttactgggggctagggacagagagttgtaagtgggagagatattggtcaaaggataggaaacttcagttagctaggagaaataagttcaagggatctattacacaaggtgttgactatagttaagaacagtgtattatgtacttgaaaatcatgagtagatctataatctcatcctttgtgctattctgcctgagctctcatgttggaaaaccatcagataaaataattccttatagtataatttaatcacattataggcaataacttaccctaatcaatttgttcatagagtttagaccttgaaattcttgcactgtagcaaaactaggtgagcactcttacagttattcacagcacaggctctactggaatggacaagatttctcaggattaccccagaagatataattaggatagaccatgaatccaagaggttttgctttgggaggagaaaatgccattcttttttgttttttaatcttctatggttgaatgcaataaaaaaaattgcccaagagaattagctcttagtgcccagctgggaagacctcctatttttgaactgatttgcaaatgatagtggtacctcaccattattgaagaaggccatagctgtattagcttcttccatccaccactcacacaacacattggccaaatcaagtcagggaaagtggtcagagctataatgatggtggtaaaagtggctgtcacttttacggatctgttactagttggacagaccaacaggcttctaccttggcctggtcagttcatttccagattagggttgacattgatggacactgcctgagtggctggtgtttcaccatcaacatcaggagtagcccagctgagaggactaatccttgtctgagttctcaagagagttactgtaccatagagttagctatcgaagggaacctgggacatccctcagtccaccacacttactccccagtgctagatcttcctctacaacacccattgcattgtcaactgacctctgcttgacatttcctccaaaagcaacccatttttactttaagagaaccaacttctcctctattctcctataacaggaattagaatgagaatagctatttactaaatacttaatatgggatttacatatatgaatttattcaattcccataccaactctgtgagataaagattaccactgccctttttcaaatgagaaacagactcagagggtgaagaaatgtgccccaagtcacacagctgaacaaggacttgcacccaggtctgtccaaccccaacaccctgtttgtaatcactaaactctacttcctcatgttaagcacccacctatctttgaattgcaatgaggcatacatcccaaaattaacattttaggtccctggagatctataatttgattatttatagaggaggaaaagccaagtttaagcaacatctaagccccacttaaataattgctttttatttcctttcatctgatccattctaggcctattttatagttgcactctcagaaggtgtgttcacttctccaatccaatttcttggggtgggggtgtgacagaggctatattacctcttagtattgcttatagaaacttcaagaaagctataaagaaaaggaactgaaggatatctctttatattttcttctcctacttgaaatacagactattaataaggggcttaaaagaataaagatgtcagcaagaaggaaaattaaaggttcaaaagaatgcctttagataaaatgagttgattatgtattgtcagactgtggccttctggtatctgaaacccttcctatatttgatgaatttcctgccatgtgaatcttagtgggaaacaaagccccttccattacagcagtcaagatagccagattctttctttttcagactctctggcagtcatggcacagatcatggtcatagacaatgatatacatccatcctggggcttcaaatccggggccagtggctcagagaacagagaaacttcatcctggcaactgtggtggcagcagccagttgccaggccagtaggtccagcagcaccaagcaaccgtatccaaggccaacaccagcagtggccgtgccggccccatgcccagtgttcagcaggagcagcagtgatggctccccaagctggctctctggtgtgacttttaatttggctctggcttccctttttccccacccatattctaagtctggttcctacaactttacagtgagtccaccagataacctggtatctctcaagaagttacttttatgcctaagccagccaaagtctgtttcaattgcttgccttgaagatctcaagtggatatatgatataaaaggacacatttgtgctcaaccagagtaacagcaagggcatcaggccatatcaggacccctcactaaattcacatcagcatctgaggcttatcctacctttggatctggaaaaacacaagtatggccagattctctcctatttatttcatgactgcatcacaaagtgaccactgcctcagaaccatactcactacacaagaatgtggaatggtaaaacagaagtggatgggactggggttcgaaagttttcattagttttctgctatattgaaatataaattctcgcctgtaatcccagcactttgggaggctgaggcggacggatcatgaggtcaggagatcgagaccatcctggctaacatggtgaaaccctgtctctactaaaaatacaaaaaattagccaggcgtggtggcaggcgcctgtagtcccagctactcgggaggctgaggcaggagaatggcgtgaacccggaaggcagagcttgcagtgagccaagatctcaccactgcactccagcctgggtaacagagcaagactccatctcaaaaaaaaaaaaaaaaaaaaaaagaaatataaattcttatcaatccccaagtatatgtaatgacatataaatttcttgtcctaacatcctactataaaatccattaatttatagaattaaaactgaggggctgggtgcgatggctcacgcctgttatcctagcactttgggaggccgagttgggtggatcacttgaggtcaggagttcaagaccaggctgaccaacatggtgaaactccatctctaacaaaaatacaaaaattagccgggcgtggtggcaggcacctgtaatcctagctacttgggaggctgagacaggagaattgtttgaacctgggaggcacaggttgcagtgagccgagatcatgtggtattgggggatacagaggtgaagtttgcttcgtgcacaaatttcttcatttaattctgcatcagagaataatcaaaacacaagcacttgggataaaggccatctaagctattttaaaacagagccagtttttgcaaacaggggtactgtttacaaaaccgtggtactggggtagttttgtaaacttggtactgctatggagtccacagggctttattacacaaaagccacattttaaatacggggaagatgtttagcaaactatcttatgtggtaaaactgtccagaaaagtcaggacatgataagcccaaatttcaaggagtggttccaacaaggagactgcacaaaaagccggcttcatgctccatacagtacagtgggcatactcaagacttattttatggttaggcttttgatgacatgatataaagtcttgaatatataacacacttcacaatgaaaaatctagaaaaagggcaaatgatgataaaaagaaaagtccacctttcacgaacatctttcttcagtctactcaattgctgaagctgcaaagagtaaatgacacacatctctggagtgtgcacaccctcctgcccttatgttaaaaaagaggatggagcctccctctcacggcaagcccacggggcagggggaggctttgaactgataatgatgtacaggtgaaagtgatcacacgtcagtgatccgcaccaatgttgatcagcactctgtggcatctccctccaggccgcatctcaggagtctacgtgttaaacgtgagcactggctaattcttcatcttaataggcacttcccaggaaactccaaccctgctgagacccctccagtttgcccagtcctgattaatgtgctacttattacagaacattgaaatggttcccagaacatgtttgcagcatctgcgtcaatcaacagatatgtctagcccaataaactgaaacactctgtcttcttccctgctgcatcttaataagaaacccagagagtttcaggcttcttgttaaccttttaaagcactatgaaatgaatctcaataaaatctaaatgtgaatacccaaaaatgggaaagaaaacacagattataactccaatcaaccaagagtaaagagaaaaagatccaacataaaacttaaattggaaccctgacagctggaaaatacgactgatgacttcaaacgctctctctcagagtagatggggccactggtggtgattgtttctttgttccagcaatgcctgaaatagcaataatgtgagaacaataattccaccctaaatgcccatgggtagagaacattgaactataacagcaagtgatatctgcagaacatcctggaggttgtgcgacatacatgggaagacatgcgaattttggcatccaaaaatcttctcaaatctcacctctacttctttcctctctgagttgcagttccccatttgtgttgtgaaggcagtaatgtctactacatggaacagctgtgagtttacatgagacaatgtgtgtgaaatgcccactatggtgcctggcatgtgggaggtgttcagtaattggctctacccttgttccgtgggacacctacagccacgaagagctgcttcattcctgctttctatgggctaggccagttgctccaggccagtagcttctggcagtccgtggttgcaccaccgagtggacagtcacgcttcagaatgtcctggagcagttttccacaatacacacaagccttgctgcataagggcacccagttttgaagatcacgtttggagcagtcaactggcttcattccaggtgatcttatgttgatgcttaatatccaggaagactcctaagggatgtttataaaccaggttggtatctaacaaagctgtgaaacagtcctaaaactgtcattgttgatcccctgttccttcatggtatgtcccttatgctcttattatcaggcaccctgtaaccacattggacagaagctccctgtccttgcagggctataatccccacattgccaccttccaaagccatccaacccaggcattgccccatgcctcaacatgaaaactcacttgcctggtaacccacttataaaaccagaaaccaaaccatttacagaagatctagtctaatcctccatttaattaataggaaatctgaggtcaaggcccaggaaaggccagatgctagcacagccaggtctggaggccagaatatccagctcccagatcagaggtgtttccactccacagtgctgtcttaggaggctcggcaggtggaccaaaaccatggcacacaatagcttagtgtgttccttctctaaagtaatatttgcttttaacagggacatataactgaatagaatgaagaatacttaaatttcaaaatagcagccagagccagtgggatgatgtttgaggttgaataagagacttttggcctccccaaatcattgtacttaggcaaccacctacactctcaggaaatgttctgcagatgaagaatgttttgtagatgtgacttccacccttccatccacctatctattcaacaaatacttgctgagtgtccaatatatacaaggtacaattcagtagggacagaaaagatgacctcttcccctgtattcatgttctgtgtgccaggtcttgcaccaagcacttcctttgccttgtctgacttaatcatcacaacaatcacatgaagcaggtatcatgtcccccattttacagacagggaaactagagctaatagaagttaagtaaatgcccaaagtcttgaagtttagtaagtaacacagctgaaatttaagcccagtctgctgtactccacaacctctgctttccctccttcctgatgctgtctctccagcaggtaggtgcacagctgacctttgtcaagaaagtattgtgaaacccacattagaaaatgcacgtgaagcaggcagcacaatgcttggcatatagtaaatgccttctctttttaaggttggacaggacaaactgtttcataaaacttttgtttagtttggaactcaatgactctttggtttgcaatattgcaacaaatgccaatattttatataaatgacaagcattttagtgtaaactggccactttgttaaaactgagcgattctcctcagaaaggaagatctaggaaaaaggaagttctagaaaaaagatctagagagattttctgatcctacagcctaaccaagttattttgtgtacccagcaccccgagtcagccaattctttttttttttttttttttgtctctctctctattcatttatctggagacagagccacattcattcctcatttaactagtacacaattagtgggtggtatttaatgaaactatgttgactgcttggataaaaaaaatcatcagaatggaatgttgagcaactattattttggttggaacaatgggctttgttaacctgaatgtaattgaaactggaagtcttccccagggattgcattacctctgctcaagtgactacaaaaactctctgatgtcaggtcgctgaatacaacttcagtggcctaaagcttctagagcagcactctctacaagagtagaatttctgtgatgatgaaaatgttctttctgtgtctcctctgccaagtagctactagccacatgtggctattgagccctggaaatgagattgtgtggcccaggaacaggatattttattttcttttattttcattaatgtggaaagccacatgtaccctgtggtcagcatagtagataacatagttacagaagaattgacaacaggaaagttgttttatagaggagggaataagggctccgtaacatgacatcataatttctagacaaacgcttaacttccctgaagcagattccgccaagagggattgggccatgttggaaagagaccagtttgcctgtaatattcttcctttctctaatcctgggctcccttcaggtagaacccagatcaccatcaggaaccagagaatgagaaaaagtagagagattgtggaacctctaagccatcttctcacagaggaggaaactagagttcaaagatgcagccacctgccctacctcatataatgaaagaacaatagagccttctgacatacagactacccgctttcaactaaatttggctgacatctgtcagttctcttctctaattaactgtgggcaaataagttttcaggtgttgcaagggccaggaaaacagtgaaaatgtctaaagaatgccaagagtaaggtgaaagggatcagtatcctatcaggagtgggcatcccatcaaaactgggcagctgccccttgcagccaattgcagccaggcaataatgtgtcatctgactgtccagttttcccaagaggagcaaggaatgagtttgcaacctgtagcttaacctatttcacctcactctcataactctcctccattctcaactaccaagaatacttgcattataatagaagatctggcattttggaagtttgttcaaaactcaggggactgaatctgtaactggcgcaatttttggctctatgaaggacaatgaggtcactggccctgtcgaggactcttcaaaccattccacataggtgggcaccgctatgctatatccagcccaaagctagtcaggagtttcactcccccaactaagaaaatttaacaaaagacagcaaataggtcattgtgcagaaacattcaaatgcttatggtattgcttattaattataacatagtggcctacatctatttgaaaaggaatatttgctgggtataaagcagatacttctactgagtataagccagatactttaccaaggttattataatatgttaatctctaaaacaccatttctagatagtgattattattcccaatgtatagatcatagattattgaagttaagtatcttgctcaagaacacaaaggaaaaacatagaacgtggactcaaaaacaagttgggcttcaaaacccaagcactttccaccatatcctgccccttcttcctgccccaattacacccacaggggttccttattctatccaacagatgggctctgggtggctctctgtgcaatagatcatcttgcacttttttttttctttcctaaatcatagtttcagacttaactaattacaacatttccattctcatcattggaaaaaaaataataaagatatttcctgctaaatcaaaacaacaataagacaaaatttcatatctgcagtgacatagaatggataagcatctcctatccaaatttaccccattcctgatgcctgtcagcagtggatgagaagtatgtgccctacatatcttctttttaaaacttgccatgtctaaatatttaaagtacaggattctgaaatgcacaattaatttttaaaactaaaaggaggaaccagagacaatacatctgctatcccaaactctttcaactgttttctctatctaaagtaaaaaacaactctcagtgcacgatttataaccgccataactctcttctgtttgagatgccacatctacaatgattaatgggaagagtccagggtttctaatactgtctactctgatggcaaattgatatatagtcctcagcaaattccatttgagtctatgattttcctgtaaatgtgccccagagttgctgccacattcctaaattccagctaaaatttatgatcacacttccacctttgattattgtgtaggagtttaatgtaaaactcccaaaatagtaatattacaattgtgtttctttattttattccaggctgcctggtactctcagttttacattagcaagctttttgatgaaaatttgcctcattttctatcagctgcattaataaaaataagtattgctgagaaaataggaccacgtggcacaattagctaatacacattccttctatttcttgtaaattatgttgaaaaaaaaatggcagtaaaaatgagtgtggggagttccatgtgcttcccaatggctggttgaaaaagtactataaattcaacacaactagccttccttgctgtaagcaccaagagcagtgtgttcaccgaaatgtgactgaaattggaaataaggtagggatgaggaatgaaaaaggccaggagatgagatgtgacggaaaaagcggaggccaagcaagatgagctggaggtggaaaggagagagtgtatgtttggagaagttctgatgaggagctgcttggtgacaagagggtcgttgagtacctgagagtacctttacctattttattatgaccaccaaagatttcaaatgattttctgcagctcttagctcccgagcacactggagctgaggaaggagacgtttctctcagaagatcatcaaaacactctagctgcaaaaaaagcagggcacatgtgcagtaaatgtaacctggatccgcgcagtcacaagcctatctccctttccagaatacaagacccctctcttcccctctgcttgcttctttcatccttacatttgtattacattttttctttttcctttttttttttttttttttttttttttgagacggagtctcactctgtcacccaggctggagtgcagtggcacgatctcggctcactgcaaccttcgcctcccaggttcaagcgattctcctgcctcggcctctgagtagctgggactgcaggcgcacggcaccacacccagctaatttttgtatttttagtagagatggggtttcaccacattggccaggctggtcataaactcctgacctcaggtgatccatccacctcagcctcccaaagtgctgagattacaggcgtgagccaccacgcttggccccttatattacttttaatggcaaaaaccgcaattacttttgcaccaacctaatattagtttaaaacatggctgcaaaattcttagaccctcctcccatttagaagggcggtctatgtcatctcccttgaactcggtgggttttgtgactattgcaaccaagagaagacagtggaagtgaggccgtgtgatttccaaggttggacatgaaaagcagtgtagcttccgtcttctttactggaactcgtatgcttggagtcctgagctccacacccagtgtctgacaacatgcaaccaccaggctgtaaggacactaagccacacggagccatcctgatcaccagacatgtgagggaaggtgtctttatgtgaccccatcctggcatccggtctcccctgcccttcaagtctgcacagctggagcagagacaacctattcccgctgtgccttcactgacttcttgacctgtagcttcctgcgtgagcataaaaaaaatggttgttctcagctgctaagttctaagataatttgttacacagcagcagtctctggaactatttcttgtttcattcccacctctgatctttctctgtggaggctccaatcctgaaataagtagtttccacttgggtgtggccctaaaactctctgttcaaatgaaaatttccacataagccattgccaactgaggctctgaggctcctcagcacacaacttgacaattactcttcttctagaaagtacatatgtgaccttccttctgtcaatcacataatttctgaagcactgctttgcctggaaagtcttgccagtttaatcatatgcaaatggagggcctgtaattttccctcacccactccccactccctccaccaatgatcaccaacatgtttgtattgagcagctaaatatcaaaaaaagtgtgaaagaaatacgagcatgatgtcttccttcaaaggacttcttatcatttttaagaggcagtgctagcccactctaccaccaccatcactatagaacaaaataataaagggagagagatattctcgccattactatggttcataataaatataatatagaaaatccttatttctgtgcttatgcaaggtacttttgctccatgcacatccatgtcaccaatgttaataatcataatgattctttttatctgaaataagatagcattcagtcacttatcatgtattcaataactatgtattgagctcttttttgtgccaggtcctctgccagcccagtggggaataaagcggacacagcccctgtcctcttgaggcttacattctagtggagtagaaagacaaaaaaatgtgtaaacataaaatagtgacttatgcagaaaagaaaagaaaaaggaggatgtggtatggagagtaactggaagtggggatggctacttcggttagggtggccagaaaagatccaggaaaatcgaggtggcagcttttaaggcagggactgaaaatgagaagtcagttaagaaaagatatgggaaacagggcttcaggtgacagagtagtaattattacataccccaaagcaggaaaaatcatttcatgttccaggagcagaaagtcttgtgtggccagagagatggggagggggcagagggggtgagaattgtgagaggcggagcaattacgtgtcatgatgccaagtgcacaagtgctctgaagttatggtctcttccctaaaaccagaagctatccaagggtaaaaacaatctatatagcaattatcctgtgctaatggttactttatcatcatcatcatcatcatcattataaagcttgtattgattatgcgcttactttggattaatattttggaaaacatcactgtgctcttccttgcttttcaaatttataaaacattcttaagacagataaaggaagaaggagttaatattcagcatctggcattcaaaacaggccatttgccaagtcttactgacatattgtcttgaggaagaatgtttaaatgtctgtattgcttttcacatatccaaatgatttggctcaaagagttcttccatggtgaaatgaagatttggcctagaagagtgtagaggaaactgtcatctctctttctcatcccaggagtgtgagaaggaaaagcagggaagaacaaagcagtcagatgtgtgtgccttaaagactcttgtgtggatagaggagagcccgagggatgaaggatttctgccccattcctgttcagggctctagaaagatatgccctctcaggctgccccataccaaggacatttggagggagttaggcagagggaggcctcgatgtttagcttttctgagcagctctttgttccctatggcaacctttgaggtagggctgggagtccaggtgtttaagggggaaattagaaagtgactagctgagagctagaacacaagcctggcaaataatgtgatggcaccctagcaaaggctgggtgtggagagtccatccagaggcattggtctctgttcctgaagtgcgatcagtggacaccatgactatgcctatgggtccagacttttctctcccaccaagaggctgcctaagcccctcccctcccctacataccagacatcatcttggagagaaacctggaaaatcctggaacacagagatctgaaagtctgagcaccttttcctagagacagagcattatctaaaatcaatacatcagactaagacagcttagacatttaatttatttttccttctaatcagcagtggtttgctcaggaggaagatcacattagttaaaatcaaaactaagaagctacctcttctccgcccatctggatgagatgtcagtgaactttgtgactcaccacaagtcttgacaaatatcatctcatttaatcctcagcaaccacacaaagcagacactatgactgacttccattttacaatgaggagagctagtctaaggttaagcaactttccaaagctcttacagctgtcaagtaacagaactgtcaaagattttcatgcttggccactgcaggtattgcctccatgtccttgatacaggctctgtgataatatgatggcaatgagcctcagacatttatatttattttaaaaacataaggcacttgccatgggagagacactgttcttactgcttctaacaggaattcatttaaacttctcaataatcatatgaagtaggtaccattaccccattttacgtatgagaatagtgaactaaaaaagctgcatacttttccccaggtcagttttgcagctaatacatggaagaactgacatttgaacataggctgactggccctagagaatgggagatgagatattaactgctgcactggacaaagagggagtcaagcaacttggtaagttctaattttttcaagtcacactcattctaggttgtaataaagcatgcactggtataattttcattgctgataaaaaggataacttccagaagggttcattttccattaactgtaaaaatctatgtgaaaatagttacaactggtagctataaccaaaataggttatgatgtttaaaggaaaaacggactaaaagactagcttaagtataaagcaaacttatgtaagggctagaactatcctggcctttcacgtgtattattaccaccactgtatgacataaccagaagaaattcagacatgtcacaaagggaagtatcacataagtgttagctaatctcattatcatcatcatcatcattgcaattattatataaaaccaaggcatcacaatatatgaaagtaatcaccatgtaaaaagaatttttcaatgcatacatttattttatactaaaagcaacgaatttcacattttaacattatttccgaatatttaagtccaattcaaaccatttagctctaaaaaagtaaaatgacaatttaaaagatcggctctaaatcagggattaaaaaccagatctaaatgaaggaaaacgtgagtgaaattaaccctaaagttagaaatatatttttcttattgctgcaataactaagctatgatccaatggtgttccccagatattttccacctttcctagaaatctcaatttacatactagtttgttccactgctactgacccaaccacccgcaaaaaaggtggctagataggtgttatattgaccacaatctttatcttcccaaagattccccatgccaaattatattcaaaaagattaatattttaagtcactaacttaataaaacagtacaattcttagagtaactatctctttttagctgagggtttttatcccagtgaaggagctgttggcttgtttttgtttctttcacttttcttgaggttttctccattcatggctgggttcatctgtacattcagtctcaggacaataggactacaattatacgtgtcttcaaaagaacactaggaaaatgttatctccactattccatcttgcaagtagatcaactaaaacacaaagaaattaggggaaaaaacagccaagggagactgagaccaataattttgttgccgttacccaacactgcatcgtttttatagacatatttacacattcacttgaaagagcaatccagaagagatagaaaaaccagtcaatatctttttagagagccttactccatctggaggtatttgggcagtctcaaataatttagtgtagtattctaccacattccaccttgtttttgtcttttttctgcatgtctggatcactgatttgtattattcccaaggagacagaactttttctcaaatcatcctcgttcttcgatgcttagttcaaaccctgcatgttttgtgtattcacatagatacttatagcaaaaggattccatcacccagaattatgttattggttctagaaaagtacaatactccttatgtttccaatgatgactatgaggcactccaagatcttaagttatttactaaatcattttgttaagtttttctgttaattttatgtcaattattttggttatttaaaaatatgtaaccactgtaaggtaataacagccagctgattgttttttatttgccaaagcctatagcattatttcctataacccttacaacaaatccttaaggtaggttttaatcaaatactttttatagataaggaaactaaggctaggctagaggtggagtcatttgctaatgactaggtgaatattaagtcataataccaggatttagatccacttcagtctgattctaaaatgatgactttaactacaacattatatagttgaagtcatggaatatatgtataattcatttaactaagctatttaataaatgcaagctccttcatcccctcactagctgagctcacaagcacataacgttcatgctatcaacagttttatttatcccaggacatacttcctagattatattcctactgactactgtagcttactttcattacatcattcactcaaaaaccctcaggatttttagagagcaatatactttataacattacctcatcaaacctataggcagaaaaaggtatattgtcaggtctgttttcatttaaatccactttttttccaatctgaaggagaagcatcccttgcatgcatattgctctatgttttacattggtcccaaaggtactcacacacaatagacttccagagcctttcattttctgaagatgagaggaggaaggaggaaggagaaggaggaagaaacgaaaggagaaatagatgggaagactacacagactcaggaacgcagtggtgcacacttggtaaaagggcataaggtacttttaatattttgcactaagccttgtcattccttccaccttcataaaaccagattctaaaagggccaaagcctatccttataaattcagaatgccatggatgtaagagaatttgggagtggtttgttttaattttgaatttcttttttcgtttattttttttttttttggaaaaacagcttagaaacttcaatctggtgaaagtatcattgacttacattgggttgtttcagccctgcatcagatcccaaagtaacaaataatcttaatgtaactactatttccatccaaccagttataagcatctcctaacccaaagaacacttccagatttttcttgctgctttatcagagttcaggttcactttgtcaaactttttacagttctaaaatagaaaacagaaccgatgccctatgtcttacaattaattgcatgcacttctgtttgttccaccaagtttctcgacagatacaatttctcccctttcgaaggtaagcagaaggggtcatgtattccttagtacatgctgtgataacagtccttgtctgtcatacacagtagggccgatgctaagacgaatctcctcaaataaacaaaccaaagcttctgtgcactagcagtccttggttttgtactttataccaattatataccatttctgccatattatccatacattgtttttatattctttaggtagtttttatgtgttaatctgcctccctagagaatgcaaataatagtcataaaaacaaaaattgatattattgagtatttttatgggtcataaaactctattaagattttttatcttaactgtttttgatcacactattaagatatgcattgcccatccagagataaagctacttaaaaataaaatcaaattaaaaagttaaatatacatacacacacaaagacaggcaactataatttggacctattataaaaattctccctggcatcattccaagggacatatataagttaaagatcagcaaagtattgctttcaaggagaaagaaaagacagaatatgcaacctacttctgttggtacacacaaggctacaaagcagtttgctggttaacactccaggtatctggagtaaaccaatcctagctattttctgaactctttcttttaagtgttataaatatggtaataaggaataaccaagaaacaaagttgtgcctcttatgtaaacctacttgtaatggaattacattaaatctgggagtcattccacatgacagccttcacttacctatctaaggtcataacatccccaaaccaagaagcacctacccggacaaattcaaagtgcctcttcgtctctggtatacgttttaaaatctctccttggttaagacacaggaagaagggaaatgaaatttgagtcttagggtaatcatttgccattgggcagacccacatcaagctagatgccagtaccttgtcacatggtaggaatgcctaagtggttgcactcaacctgggtgagacaactggaagtccaaacctttaaagtgccactgaaagggagcaatcaatggtactcattaatgtgcatgggttcccttctttcagcacctatttcctagaccctctgcatctgatcaggctatgagacaagttctagccaatagaatgtgaatgtaagtcatatgtaccccatccagacctggttcctaaaacctccaaaccacctattaagaggtgacagcatgctgacagccctcacagcccttgctggctctcagcgcctccttggccttggcgcccactctggccgtgcttgaggagcccttcagccctcccctgcactgtgggagcccctttctcggctggccaaggccggagccggcgccctcagcttgcggggaggtgtggagggagaggtgcaggcgggaaccggggctgcgcggcaggcacttgaaggccagtgcgagttccggtgggcgtgggcttggtgggcccgcactgggagcggcaggccggccccgccaccccgggcagtgaggggcttagcacctgggccagcagctgctgcactcaatttctcaccaggccttagttgcctccccacggggcagggctcgggacctgcagtgcggccacgcctgagtctccccacacccccaccatgggctcctgtgcagcccgagcctccctgacaagcgctgccccctgctccagggcgcccagtcccatccactgccaaagggctgaggagtgcaggcgtagggcgcgggactggcaggaatctccacctgccgcccggtgcgggacccactgggtgaagccatctgggctcctgagtctggtggggacttggagaatctttatgtctagctaagggattgtaaatgcaccaatcagcactctgtatgtagctcaaggtttgtaaacacaccaatcagcaccctgtgtctatctcagggtttgtgaatgcaccaatcagcactctgtatctagcccaaggtttgtaaatgcaccaatcagcactctgtgtctagctcagggtttgtaaatacaccaatcgacactctgtatctagctaatctagtgtggacatggagaacttttgtgtctagctcaaggattgtaaatgcaccaatcagcacactgtcaaaacagaccaatcagctctctgtaaaacagaccaatcagctctctgtaaaatggaccaatcagcaggatgtgggtggggccagataagagaataaaagcaggctgcctgagccaccagtggcaacctgctggggtccccttccacactgtagaagctttgttttttcactctttgcaataaatcttgctgctgctcactctttgggtccacactgtctttatgagctgtaacactcactgcaaaggtctgcagcttcactccggaagccagcgagaccacaaacccactgggaggaacgaacaactccagacaccctgacttaagagctgtaacactcaccgcgaaggtctgcagcttcactcctgagccagcaagaccacgaacccaccagaaggaggaaactccgaacacatccgaacatcagaaggaacaaactctggacacactgcctttaagaactgtaacactcaccatgagcgtccgcggcttcattcttgaagtcagtgagaccaagagcccaccaattctggacacactatcatacactcttccttcagagaaattaatatccaagactctggggctttagaggataatgaactaggtaaaaacagcttgggaatctgaataactttgtggaacatgctgtgtcccactttacccccaatccacattgtaatgtgatacgaacaagaaataaatatgtaatatataaagccattgagatgtagggattggcctgttaaagtcttcatgctaccatgactaatcacactgtgcgattccatctacaaatggcctacatggttattaattaatcaaacatccaatttacctgaagtagatgtccagactcatttgtactgccagaacagccagaacatgaagtagtcatggtaatagccacaatggtgtttgggcaaccagattttaaaaactgattgacagcaattgaaaagaccacataaagcaagtgtgcccagagaacagcctctctcaattctggggcggattctccccacagatttatcttgtttaatctgtgagatgagtacaattgtatcacggatgagagaactgagatttagtgtacctcacccaagatcatccagcctacatctgtctgcttgagttcagatcctacactcacaaccattgcactcctggagggcaaaaaccagacttctgcatatctttgttctgttttttgtttccctcacacagttctaagcctagagcttagtagtgccagtagtaccagttaatacattctccaaagaagctaacacacttgtttctcagaggaaaaatcaactacattcgcaacatcttttcaagccattcagttacagtgttttataataagttggaacaataggccaggaagggtatttgacaggaggacatagaagagtcaaaggcaggtggcaacaggaatctcaacatgggaggatggggcttgggggcttagagctttagaatataaagaagaattttttttagaaagcagttaccaagaagaagaaaaaaaactcttctgaatgggctcttttgagtgttgattccacaagtatagtacaacatcgtgttgggaccacacagtttaaagtactaacagatttagagaaagacaaacacatgagaaatgtccttgtctataatgtttaaatggtcagggtttaaagggaatgcaagagagagggaaaaaaaaaacactctaagctaacattaaagataaacacttccaaatttcataacaatgagttcacaattcacttttcagtatactgcagacaagaacctgaaaaagagactcctgaattacctagtgacaatttaatgttccaggaagtggagaagattccatcagagtcactgtttccacaggaaaacattgattcggaatgttcattgagtagctaagtcttgtcacaaatatctttagctcctcaaattcagaagagcaagtgaggtaaagggaaaaaaaacaagaaagaaagaaaagctagaaagctcacaggacatgattccatacagaattaataaagttagactgtgcatttgaaagacacgagttcaaattgggaacaggctagcatatgttatatccctatttttaaagcacaaaaaggggagaataatttgaaaatcagactgactaaaatggaaataaaattgcacttttaaaatggatattatcagctgattcgtgccctggaatattaggaaaatcaaccacagcaaccacagtaataataataactctaatttatataaatcgctgctgcttatcttatttgtttttttgttttgttttttatccttctatagactattttcctttattttctgtgtgactctttttgtctttttttgtactttaaatttttttatttttaattgttctgggtacatagtaggtataatatatttatggggtacatgagatgtttacacagagacatgcaatgtgaaataatcacatcatagagaatggagtatccattccctcaagcatttatcacttgtgttacaaacaatccagttacactctcggttatttttaattgtagaaataagttactaactctagtcaccctgttgtgctatcaaatagtaggtcttattcattctttctattttttcctcattaaccatccccctcccccttagcccccttatttgttataacaagaaacttgtaagttaatcagggaaagattattaaaagattaagataaacataagaataaaaaatagaagccaattttgtagatgtaccatggagaaaatggatactgcaggtaaaacaaaaaagtcagcattcctcccatacatttttaacgaggctacagccactaacacagctgctggagggaaatttggcaacatttaactaagtaacaaatgtgcatacattttcaggtagcaattgcacttttatgaatgtatcctacagatatactggcatataccaaatggtttacccaaagtagttcatgaagcattgtttataataaccaaaaagtatgagtaaaaataggaatctggtgagataattcatggtatttcataaaactgagtatcatgtagcccaaaaaagaatgtagaaattctttatatattaatatgtatagcctccaagatatgtcattaagtagaaaaaagacaaaacacaaaaaaatataaagtatgcacatcatgctatcatttatgtgaggaaaataagaagagggagaggatttcatatatatctaaaatatgtctgaaagggaacaaaaagaactggtaatatctatcacctctgaggagaagaattaggctactagattagaagagagattttttgctacatattcttctatagcctttgaattttattcatgtgaatcaataaatacattccctgatcaaaaataaaatgattagaattacaaattttttaagataggcagaatgcattgtaaactagaaacaattgcaaatcaaattgatacctatatatttctgcttccagctatgatagagtaactagtaacagattatctgtctcacagaaaatacttacaaaactaagtaaaatatatgaggcaaccgttttcaaacagtggctaacaagccaatccagaactgaaatccctctgcccacgaatgtccacctctgtgaataaggatattttcctaaacatgacaaaaagagctggagtctgaggcagctggcatggctggcatctataaagcagagtcttagagagtaaagactttaacacagagaagtctcagaagttttgcagagatttgtcccagacatgggacaaatctgtgactgagatcaccaccatacatttgcagagtgagaatactggaggcttaacagagagaaaatgttatcaggttgagagaacagaaatagtggaggtcaagtaatgctggaagaagaatagtactagacatcattgcagttcaggtcctatgggtttgagagagctcataaataaatactactttgacacccctgggatctacctgagaaacagaaagttggtacctctctacaagtaaagactatgtcctaaagtaagtcctatgactccagtaaagtctaaaacaaagcctatcatcaagaaaaacatcctctatcaacactgaatactgccaggttgaataggttgggaaagcacctgggatttctcaaagatttggactaacaaagcctaaaaccatgcttaaacatgttcaacgtgatcagccaattgaacagcatgctaagataacaagcaaaattcttcagaagaaaataacacaatccagaggcatgataacacattgtccaaaatgtccagtatgcaataaaaaatcaccagataaagaaataagatctccattccaagatggccaaataggaacaactccagtctgcacctcccagcgtcatcgatgcagaagatgggtgatttctgcatttccaactgaggtacttggttcatctcattgggactgattggacagtgggtgcagcccatggagcgggagccagcgcagggtggggcatcgcctcacctgggaagtgcaaggggttgggggatttcccttttctagcaaagggaagccatgacaaacaggacactcccgcccaaatactgcgcttttcccactgtcttagcaaccagcagaccaggagattctctcctgtgcctggcttagcaggtcccacacccatggagacttgctcattgctagcagagcaatctgagattgacctgcgaggcagcagcctggtggggggaggggtgttcaccattgctgaggcttaagtaggtaaacaaagtggccaggaagctggaactgggcagagcccaccacagctcagcaaagcctactgcctctatagactccacctctgtgggcagggcatagctgaacaaaaggcagcagaagcttctgcagacttaaacatccctgtctgacagctctgaagagagcagtggttctcccagcatggcgtttgagctttgagaacggacagactgcctcctcaagtgggtccctgacccccacatagcttaactgggagacacctcccagtaggggctgacagacatctcacacaggcaggtgcccctctagcacgaagcttatggaggaaggatcaggcagcaatatttgctgttctgcagcctccactggtgatacccaggcaaataggatctggagtggacctccagcaaaatccaacagacctgcagctgagggacctgactgttaggaggaaaactaacaaacagaaaggaatagcatcaacatcaacaaaaaggacatccacaccaaaaccccatctgtaggtcaccaacatgaaagaccaaaggttgataaaaccaaaaagatggagagaaaccagtgcagaaaatttaaaaattctaaaaaccagagtgcctcttctcttccaaaggatcacagctcctcacgagctatggaacaaagctggacggagaatgactttgacaagttgacagaagtaggcttcagaaggatggtaataacaaacttctccaagctaaaggggcatgttctaacccattgaaggaagctgaaaatctttaaaaaatgttggacgaatggcaaattagaataaacagtgtagagaagactttaaatgacctgatggagctgaaaaccacggcacgagaacttcgtgatgcatgcacaagcttcaatagcctgttagatcaagtcgaagaaaggatatcactgactgaagatcaaatgaatgaaataaagcaagaagacaagtttagagaaaaaagagtaaaaagaaacaaacaaagcctccaagaaatatgggactatgtgaaaagaccaaatctacgtctgattgatgtacctgaaagtgacggggagaatggaaccaagttggaaaacactctggaggatattatccacaagaacttccccaaactagcaaggcaggccaacattcaaattcaggaaatacagagaacatcacaaagatactcctcaagaagagcaaccccaagacacataattttcagattcaccaaggttgaaatgaaggaaaaaatgttaagggcagccagagagaaaggtcgggttgtccacaaagggaagcccatcagacaaacagcagctctctcagcagaaaccttataagacagaaaagagtgggggccaatattcgacattcttaaagaaaaaaattttcaacccagaatttcatatccagccaaactaagctttgtaagtgaaggagaaataaaatcctttacagacaagcaaatgctgagagattttgtcaccacaaggcctgccctaaaagagctcctgagggaagcactaaacatggaaaggaacaactggtaccagccactgcaaaaacatgccaaattgtaaagaccatcgacaccatgaagaaactgcatcaactaatgggcaaaataaccagctaacatcataatgacaggatcaaattcacacataacaatattaaccttaaatgtaaatgggctaaatgctccaattaaaagacacagactggcaaattggataaagagtcaagactcatcagtgtgctgtattcaggagacccatctcacatgcagagaaacatataggttcaaaataaagggatgtaagaagatctaccaagcaaatggaaagcaaaaagaagcaggggttgcaatcctggtctctgacaaaacagactttaagccaacaaagatcagaagagacaaagaaaggcattacataatggtaaagagataattcaacaagaagatctaactaacctaaatatatatgtacccaatacaggagcatccagattcataaagcaagtccttagagacctaaaaagagacttagattcccacataataataatgggacactttaacaccccattgtcaatattagaccgatcaaccagagagaaggttaacaaggaaatccaggacttgaactcagctccgcaacaagcgggcctaatagacatctacagaactctccaccccaaatctacagaatatacattcttctcaggaccacatcacacttattctaaaattgaccacataattggaagtaaagcactactcagcaaatgtaaaagaacagaaattacaaaaaactgtctctcagaccacaatgcaatcaaattagaactcaggattaagaaactcactcaaaactgctcaactaaatggaaactgaacaacctactcctgaatgactactgggtacataatgaaatgaaggcaaaaataaagatgttctttgaaaccaacgagaacaaagacacaacataccagaatctctgggacacatttaaagcactgtgtagagggaaatttatagcactaaatgcacacaagagaaagcaggaaagatctaaaatcgacaccttaacatcacaattaaaagaactagagaagcaagagcaaacaaattcaaaagctagcagaagacaagaaataactaagatcagaggagaactgaaggagatagagacacacaaaaaacccttcaaaaaatcaatgaatccagaagttggttttttgaaaagatcaaaaaaatagactgctagcaagactaataaaaaagagagaagaatcaaatagatgcaataaaaaatgataaaggtgatatcaccactgatccacagaaatacaaactaccatcagagaatactataaacacctctacacaaataaactagaaaatctagaagaaatggataaattcctggacacatacaccctcccaagaataaaccaggaagaagttgaattcctgaatagatcaataacaggctctgaaattaaggcaataattaatagcctaccaaccaaaaaaagtccaggacccgatggattcacagctgaattctaccagaggtacaaagaggagctggtaacattccttctgaaactaatccaatcaaaagaaaaagagggaatcctccctaactcattttatgagcatcattctgataccaaagcctggcagagacacaacaaaaaaagagaattttagaccattatccctgatgaacatcgatgagaaaatcctcaataaaatactggcaaactgaaaccagcagcacatcaaaaagtttatctgccacaatcaagtcagcttcatcccagggatgcaaggctggttcaacatgctcaaatcaataaacctaatccatcacgtcaacagaaccaatgacaaaaaccacatgattatctcaatagatgcagaaaaggccttcaacaaaattcgatagcccttcatgctaaaaactctcaataaactacataatgatggaatgtatctccaaatagtaagagcaatttttgacaaacccacagccaatatcatactgaatgggcaaaaactagaagcattccctttgaaaaccagcacaagacaaggatgccctctctcaccacccctatgcaacttagtgttggaagttctggctggggcaatcaggcaagagaaagaaataaagggaattcaattagcaaaagaggaagtcaaactgtccctgtttgcagatgacatgattgtatatttagaaaaccccatcatctcagcccaaaatctccttaagctgataagcaacttcagcgaagtctcaggatacaaaatcaatgtgcaaaaatcacaagcattctgatatacaaataacagacaaatagagagccaaatcatgagtgaactctcattcacaattgctacaaagagaataaaatacctaggaatccaacttacaagggatgtgaaggacctcttcaagaagaactacaaaccattgctcaacgaaataaaagaggacacaaacaaatggaagaacgttccatgcttatggatgggaagaatcaatattgtgaaaacggccacactgcccaaggtaatttatagattcaatgccatccccatcaagccaccaatgactttcttcacagaaatggaaaaaactactttaaagttcatatggaaccaaaaaagagcccacgttgccaagacaatcctaagccaacagaagaaagctggaagcatcacgctacctgacttcaaactatactacaaggctacagtaaccaaaacagcatggtactggtaccaaaacagagatatagaccaagaaatagaacagaggcctcagaaataacaccacacatctacaaccatctggtctttgacaaacctgacaaaaacaagaaatggggaaaggattccctatttaataaatggtgctgggaaaactggctagccatatgtagaaagctgaaactggatcccttccttacaccttatacaaaaattaattcaagatggattaaagacttaaatgttagacataaaaccataaaaaccctagaagaaacctaggcaataccattcaggacacaggcatgggcaaggacttcatgactaaaacaccaaaaagcaatggcaacaaaagccaacatagacaaatagtatctaatcaaactaaagagcttcggcatggcaaaagaaactaccatcagagtgaacaggcaacctacagaatgggagaaaatttttgcaatctacccatctgataaagtgctagtatccagaatctacaaagaacttaaacaagtttacaagaaaaaaacaaacaaccccatcaaaaagtgggcgaaggatatgaacagacacttctcaaaagaagacatttatgcagccaacagacacatgaaaaaatgctcatcatcactggtcatcagagaaatgcaaatcaaaaccacagtgagatatcatctcacaccagttagaatggcaattattaaaaagtcaggaaacaacagatgctggagaggatgtggagaaataggaatgcctttacacttggtgggagtgtaaattagttcaaccattgtggaagacagtgtggcgtttcctcaaggatctggaactagaaataccatttgacccagccatcccattactgggtatatacccaaaggattataaatcattctactataaagacatgcacacgtatgtctattgcggcactattcacaatagcaaagacttggaaccaacccaaatgtccatcattgataggctggattaagaaaatgtggcacatatataccatggaatactatgtagccatgaaaaaggatgagttcatgtccttttcagggacatggatgaagctggaaaccatcattctcagcaaactatcacaatgacagaaaaccaaataccacatgttctcactcataggtgggaattgaacaatgagaacacttggacacagggtggcgaacatcacacaccagggcctgttggggggtgtggggggtgggggatggatagcattaggagagatacctaatgtaaatgatgagttgatgggtgaagcaaaccaacatggcacatgtatacatatgtaacaaacctgcacgctgtgcgcatgtaccctagaacttaaagcataatttaaaaaaatgaaaatatgatacataggcaagcaaaaaagcagtaaatacaaacaaatctcaaaattacccagatatgtccaaacaaagaatctaaagcagcttttgtaaatatgttaaagaattttaaatatatatgtccaaagaatgacaggaaatatgatctcaaggagtgaatagaggagtctaggcagagaaaataaccaaatgaaaattctagaactaaaaaaaaataaaaatgaacaatttagtggacaggtctgaatagctgattagagatggcagaagaaaagagaacctaaaacagatcagtagaaattatttaatcttagaaaggaagagtggggaaaataatcaggaagatgaactaagatttaggaataggtaggacaataccaaatagtcttaacgtaaatgtaattggaatcctagaaagaaaagcgagtgagaatgggccagaaaaaaatatttgaaggaataacagctgaaaacttttcaaaacgatcaaacagatccaagaagtttagcaaaccccaagaagaataaatataaagaaaaccacacccaggcacattgtagtaaaactgcagcacatccaagataaagaggaaatattaagggcatccagaggaaagacacacattacgtacagttgaacaaggataagaatgatcatgggcttatgagaaacagtggggactgaaaaccccaatggcatggaatttttaaatcgctgaaaggaaaaacgaaaacaaagctgttaactcagaactctacaaccaacaaaaatattcttcaaaaatgggaagaaaataaaggcactttcagataaataaaagctgagaaaattaatcaccagcagacctacactataagaaatacaaaaagttgaagataactgataccagatggaaattcagatctacagtaagaaagaaaaagagcactggaaatgttaagtaaattactaaatataaagtagtatgttttctttcttagaatttccttaaagactactatttaaggcaaaagtgaaaacactctaaggttggggttatgacatgttaaaataatgaatatgacaataaccatacaaagaaagggagatgaggccaggtgttgtggctcatgcctgtgatcccagcactttgggaggcagagcagggaggatcatttgagcccaggagtttgagaccagcctgggcaatatagtgagacttcatgtctactaaaaataaaaataaaaaattaactaggtgtggtggcacatgactgagtcccagctactcaggaggccgaggcaggaggactgcttgagccccagagtttgaggctacagtaagccatgattgtgccattgcactccagcctgggtgagagcaagaccctgtctcaaaaaaataaaaagaaaataaaagaaagaggatgactaaattgaaataaaatgttgtaagtttactacatttgtcaaatgttaagtgtgaaatgtggagaggtacaatactgagtatgaatagattctaatgcataggggctgcatatttttagcccttgagcaatcaagaaaattaaattaaaaaggaagataaatgataaacagagagataagggggtataactaaaagccaatagaaaaaataaaatggcacactaaaaaatattcaaatgctctgaaaagagcaggaaagaaacaacagaggaacaaaaaacagaagagataatgagaaaaaaaaaaagtttgatacctggtgtttagtggaattcactcaataaattcattcatgcaatgagaggctactatactgatgcctgaaggtatgtaaatgttcataagccttgcctcctactctcaaaaaccttacaattatacatgcgactatgcaacaaaatggcatatgaaaaatacaaataaaattatagttatcactgaggacttcctatatactgaaaatcctactaaatgcttcacaaatagtatttacttctcacgatgatataaagaattttcataatgtaggtatccttggccccactttgtagataaagttggatgtaagcttcatgacagcacaaaccataaatattatttaccattgtgttaccaatgccttacaatttgcacacatctaatacaagcttagtaagaagctataaaaagaataagtgaatggcaaaggatataataatctactcaaagtcatgctgagaaccagaatttggaaccagacagacttcggtccaaagtccttgatactaacagttaggatcccaaaaggcaataacttgggtgacaatacatccagtttacacaggatagttccagtttatgattattgtcccaatgtgactactaatagttctcccattcattcaccctcaaaaaatgccaaatttgtatgataaatgttatggtttctctagctataagatttcagaggagattcttcctatccatgagcatggaatgtttttccatttgtttatgtcatctctgatttctttcagcagtgttttgtaattctcattggagagctctttcacttcactggttagctatatttctagatatgttattttttgtggctattgtgaataggattatgctcttgatttggcactcagcttggacattatcggtgtagagaaatgctactgatttttgtatccagaaactttgctgaagttatctaggagcttttgggcaaaactatggggttttctaggtagtttgacagaggtagtttgattttctctcttcctatttggatgcctcttatttctttctcttcccttattgctctggctaggacttccaatactatgttaaataggagcagtgagagtgggcatccttgtcttgttccagttctcaagaggaatactcccagcttttgcccattcagtgtgatgttggctgtgggttttgttgtggatggcttactattttgaggtatgtccttcaatgcctagttttttgaaggtttttaacatgaaggttgctgaattttatcaaaagccttttctgcatctattgagatgatcatgtgttttttgtttttattccgttcatgtggtgaatcacatttattgatttgcatatgttgaaatcagtcttgcatcctagggataaagcctgctcaatggtggtggattagtttttttttttttgtttttttttttaaacaattttataactttatttggtatatttgatgattagcagttagttcacattcacaccgactgtagatttttttaaagtggtaacaggtacgtaggcaaccaaagtatagagcttgtttggtaaatctttatcttcattacattttctggacaaccgaacatggatacagtatgagacgttgcttattcctttggcccagacagctttgttgagcctggtatcaaagtgtgcatctggagttcccatctccttcagggcaagtttccggagctctttgagtgcctgaggggcacgcttcttgaagcccactccatgaatgcacttatgaatgttgatgggatattctcgggtcaccatctcgttgatggcgaatgacccttcttcttctcatcacccttctttgcaggagccattctgccgggcccaagttggaaaggaaactggccactattcttacatcataatcagtagtaaagctagtctcatcttccactacttcccctcttcctccctctactccagccccttggccttgcttctttccctgagggcctcgaccctagctttcccttctgcctcgcatgccattcccccagatatccttctgcttgactaatttccttgtctcctgcaagttcttagctcaaacctttcttttttgtttgtgttttgtttttttttgtttgttttttttttttattgatcattcttgggtgtttctcgcagagggggatttggcagggtcataggacaatagtggagggaaggtcagcagataaacaagtgaacaaaggtctctggttttcctaggcagaggtccctgcggccttccgcagtgtttgcgtccctgggtacttgagattagggagtggtgatgactcttaacgagcatgccgccttcaagcatctgtttaacaaagcacatcttgcaccgcccttaatccatttaaccctgagtggacacagcacatgtttcagagagcacagggttgggggtaaggtcacagatcaacaggatcccaaggcagaagaatttttcttagtacagaacaaaatgaaaagtctcccatgtctacctctttctacacagacacagcaaccatccgatttctcaatcttttccccacctttcccccctttctattccacaaaaccgccattgtcatcatggcccgttctcaatgagctgttgggtacacctcccagatggggtggtggccgggcagaggggctcctcacttcccagtaggggcggccgggcagaggcacccctccctcccggatggggtggctggccgggcggggggctgacccccccacctccctcccagacagggtggctgctgggcggagacgctcctcacttcccagacggggtggctgccaggcggaggggctcctcacttctcagacggggcagctgccgggcggaggggctcctcacttctcagacggggcggttgccaggcagagggtctcctcacttctcagatggggcggccgggcagagacgctcctcacctcccagacgggttcgcggccgggtagaggcgctcctcacatcccagacggggcggcggggcagaggctctccccacatctcagacgatgggcggccgggcagagacgctcctcacttcctagatgggatggaggtcgggaagaggcgctcctcacttcctagatgggatggcggccgggcagagacgctcctcactttccagagtgggcagccaggcagaggggctcctcacgtcccagacgatgggcggccaggcagagacgctcctcacttcccagacggggtggcagccgggcagaggctgcaatctcgacactttgggaggccaaggcaggcggctgggaggtggaggttgtagcgagccgagatcacaccgctgcactccagcctgggcaccactgagcactgagtgaaccagactccatctgcaatcccagcacctcgggaggccgaggctggcagatcactcgcggttaggagctggagaccagcccggccaacacagcgaaaccccgtctccaccaaaaaaatacgaaaacctgtcaggtgtggcggcgcaggcctgcaatcgcaggcactcgcaggctgaggcaggagaatcaggcagggaggttgcagtgagccgaggtggcagcagtacagtccagcttcagctcggcatcagagggagaccgtggaaagagagggagacggagaccgtggggagaaggagagggagagggagagggagaggggattagttttttttatgtgctgctggattcagtttgctagtattttgttaaggatttttgcatctatgttcatcaaggatattggtctgaagtttttacgttgttgttatgtctttgctttgtctttgccaggatgatgctggcctcatagaatgagttagggaagagttcctcctcctcaattttttggaatagtttcagtaggaatggtaccagctctactttatatgtctggtagaattttgctgtgaatctgtgtggtccaaggctttttctggctggtagcctttttattactgattcaattttggaacttgctattggtctgatcagggtttaaatttcttcctggttcagtctcgagaggttgaatgttttcaggaatttatcaatttacatatgcaatgctattcctgtcaaatgaacaatgatattctttacagaactagaaaaaactattctaaaattcatatgcaacccaaaaagagcccaaatggccaaagcaattctaagcaaaaaagaataaagctggaggaatcacatcacttaacttcaaactatacttcaatgctacagtaaccaagacagcatggtataggtacaaaaatagatacatagaccactggaacagaatagggagcccagatataaacccacacacttacaaccatctgatcttcaacaaagttgacaaaaacaagcaatggggaaaggactccctattcgataaatggttctgggacaactggctaatcatatgccaaagactgaaactggacagcttccttagatcatatacaaaaatcaactcaagatggattagacacttaaatgtaaaatgtaaaattataaaaaccattgaagaaaacctaggaaataccattctaaacataggccctggcaaagattttatgatgaatatgccaaaagcaattgcaacaaaaacaaaaattgacaagtgggacctaattaaactaaagagcttctgcacagcaaaggaaactatcaacaaagtaaatagacaacctacaggatgggagaaaatatttacaaattgtgcatctggcaaaggtttaatatccagaatctataaggaacttagacaaattgacaagcaaaaaaacaaacaagcccattaaaaagtgggcaaagacacttttcaaaataagacatttacacggccaacaagcatatgaaaaaatactcatcatcactaatcattagggaaatgcaaatcaaaaccacaatgagatatcatctcacaccagtcagaatggctattattaagaagtcaaaaagtaacagttgttggtgatactgcaaagaaaagggaatatttatacactgctagtgggaatgtaaattagtccagccactgtggaaagcagtttggcaatttctcgaagaacttaaaacagaaccaccatttgacccagcagtcctattattgggtatgtacccaaaggaatataaatcattctaccataatgatacacacatgcatatgttcattgcagctctattcacaataacaaagacaaggtatcaaccaaaatggtcaacaacattagactgaataaagaaaatgtggtacatatacattatggaatactatgcaaccataaaaaagaatgagatcatgtcctttgcagcaacatgtatgcggctggaggccattatcctaagagaactaacacaggaacagaaaaccaaatactgcatgttctcatttataattgggagctaaacattgagttacatggacacaacgaagagaaggacagacagcggggcctatttgagggtggagggtaggaggaaggtgatgatcagaagactacatattgggtactatgctcattacctgggtgacgaaataatatgtacaccaaacccccaaaacacaccatttatctattagagcaaacttaaacatgtgcccctgaaactaatatttaaaaaaaaaagatttcagaggagaaagctctctttgattgacatgatcaggaatcttcatttaagagatgacacttgaattcagctttttaaaaaataaataggatttgctatgcagacaagaggttaaggcttaaaaattgaaaagagttctgtaactttaagaaaacatgacatgaatttataaatggttgtaagattcggcactgtaagaaatctttaaataaaaattattgttcacagactttcataagtgatggggattgaaagctttctaaattatcagaaaccaaaggctgataacaaagactactgtgtaacacatctcactgggctgaggggaagacaccagaacatgtctcttttttttttaatatttgtgtgttttaaaaggcagagtcagtagcatgaattgtatagattactctaattttaaaggcaaaagtaagaaagatttaatggatttaaatggacacaaaaagaggtaacattaaccaaagtggttttcaattagtcggacacaacttagttttacttgttaaatacaatttgtaattcagatattatgcagaaaacaaagctcataggcatcctaatggtttttagttgtagaatctgaatccattcctaaatctctctgattccatctctcactcaaacctccagatttcaatgcaccaacaatgatgagtttgaatggaaaaaatcaaggtacaaaaagaaaggccagggctttcctctctctcccttgctctcagggatgggtctgtatgtcaaattaagagtattgaaccctgcaaagaaaatgctgatggagatacagaaatgaaaaagggagttagagattaactgcttggaaaaaataatgatttataaatatgttcagagtatactttgtcaagagcactgacttatggcatgaaattaaagggaagtaaacatgggtcaagaaactggaaggacaattatgagatgtgtttgccattagcctgtaaacttctataacagaattgttgtctaagagatacaaaagtagttcctttatgtctgcaatgtaaaaccgaacttgaaaaactatctaagaatattcagtacagatggttccttttgaatgatgggaattactagaacaatgtgttatgcatttttcaactctgattactaaatctctatcctgaatttctttggcacaaaaagcattttaaatcaaacaactagagcatatatttaaattgtttaaatcttccctttttctaaagtacctgcttgatagacacaacttaacatataacttaaatgtttaaatttccagagaatctttaagatgttttagaaagttcacagcttttcatttgtttggcttttttatttttactcctaacaaaaagtttaggtttacatttggaagctttatgacaattggtgttagttatgaagatgattgtctcttgactctctttgcttagaagtctatggagcatgtagctttcaagatttttttttgaaactgaagcccaatattttatttctaattggggaatacctctttctatttgcaacttgaataaatgagagaattatttaggacgtgaagattaatgaagattcaagaagatgaatgtctcttgactctctttgcttagaagtctatggagtatgtagctttcaagatttttttttagaaattaaagtccaatattttattgcaaattgggaaatacctctttctatttgcaacctgaataaatgagagaatcatttaggacaagttgagtgttcttccattgcagactttcttaagctaacatttattaaacagaacaaaaaagacagatctttaatttttcagagcctccagggctggtttataggtttcaggacaattcagctaagaagcctaccaaggctagtagggaaaaggaacacagcagaaatgattgctatgtaaacaaaagttcagagtagataatgaaactctggagaagcctgccagagaagcttttcaggtagcatttctttaggtaggcaaattcatctgaatttatcaaagtgctgaatattgataatttgtgaattagttttctggttctgctgttaaaaaatcttttggggaatgacaacaatcatccattgatcccaagtagtaccaatttattaggaacaagaaatgtggccatattatttgttctgaaattactaatagtgtcttatatgaaaccaatagcccagaaacaaagtcaaaaatcagttagactgtacagcaagtttctaatattaatcctcaataaagatttttagaaatccaccagctttcatttatttccctgagctctcctttgaatgttttcaagacattcaaattttctcctacacaaaatcctatgctttcaatacaagagcactgtatttgtatttaaaaattaatagtaagccaaaacaactcatgatgtgttccaagtagagttcaaagtagattaagatcaagaattcatttaatctagcttgagcttcaaacagaaaatactcatcccttccacaccctttagaattgaagtatgattgcccactgcctaagctacttgcaggtggcaaccattattcatacatgtttagaagcagtaggagtcttctcaggccactaggatgcattcggttcactgaagcatactgaacactacccacagaacttatgctgtttttagaagcatgaaattaggctcaatgaagtaatgggctaaataacgggaaaattcagcactgtttttaagtgctgatatttgacacttttctgcaaggaatctctgctaattatccctttacctaaagggagcaggcaactggcagaaaaaatattatgaacattgtacagagaatagactatagtcatgttttaaaaacaaaattcataggtttggagctagaggtcttgagttcacacatattctgactcgaccactctagatgtgtgacctcaacacaatcactttttctcccccacacaatcactttttctcccccacatcatttcctcatcttcaacagaatatctactctatctggttgttgtgatagttgaacatatgtgaacctatttcaaactgttgcttggctctttggaaggtactcaataaacactggttgggcacaagctttggaatcagacaaatctaagtttaaatcccaattccatttattaactggttgttttgggcaggctatttgaccggtctctaagtctaagtttattcatctgtaaggtacaatgaaattactacccttcaggctcactatgaggatgagacaatatataatgtactgagcaaagtgccttatacaaagtattaaataaataaagcctattgtttcacatttgactctacagcacaagaaaagctaagtggccagcttgtggtttcattgaaagttagtggtgggtatcctctcctatctttggactccaaggttctctctgtttcccaataacctactggtagacttttccactgcaatttgcatggcaggccttgaatagtcttaatacacttgggctttgtcttattttactttatgtttatattaataccctttctttgaacataaattcagaaagaatatgtaaattgaggatattctttagatctttgaatccattatggaaattcagttgccagtgcttccatggtgaaagtctttctttctagcttcagaagcatccagataaacaaattaataaaagcttatgtttccatatcaatcctgctgtagacattttatgtctggccatagaagctatgatgaatttttatttctactttccttcattagaacaacttttgcaaaagaagactgactttgtcttaaggaaaaaagtcataaaccagcctcattaagaagccatctcttttgtgattgacagcaggcaaatgcaggacagtgggcactatctgagaatggagtgaagtgacccttggtgagggctggaatatgccctataaatttaacagattttaaaaagcctttagatagcattcgtctgttctgacatgtcagataattcatagtggagagaaatcattttaatgcaattattacgggaaagccattaaccaaatgctaaccatgttctgcattagggaatttacacttgcaagtaataatagggatcaaacaagggagggagagtaaaactagagcacacagatgagaaagaagcagggagaagtacttggaaatgcctttcctgttaacctcatgtaaaagagcagctctcctatcttcaccatctaaacccttactctgctttattcttctgtgtggtactattaccacttgatatttatatttttagctaatttattttttgtatgcttccccctttaaaatgtaagctctatgagggtagaatattgtgtgtattttgttcattgactgtaccccttgtgtctagtactgagcctggcatatacatgcttcaatacgtgtgttcatcaacagaagagaggccattacctgagtaacccaagtcagtctacacagacctggaaattaggacgtctattcagggccttgaaagatgtcagaaaaaatgagcaattttttttttgacagtcattactttctcataattgtagaggttgaagaatggttaaaagtgagaagaggaaataaacatattaataggaggaaggtgcttgattgtactcctgacaaaagaaacatgaattaaaattaaaacaaagtagcattttttttcctatgagattagcacctgtgttggtagggtggtaagaaaagcagtcattcccagacaatcttctggaaaggaagattggtaaatttggtaactgcttttatctaataattctacccttaagattttgtcctacggatatacttgcacaagcatgcactgttggagataggaaaaggttgagacaacctaaatgtccaccaggaaggaactggctatgtacatgatatgacatataagtagaacaccgtgtggcctttaaaaagaacaatgcgtccccgatacaatatttcacctctccagaagttcccagttgataaccaccaaacatttgtttaaattcccaaaataccttatggcttaattagggaccattgttttcacaccaatatcaaagctcttataactgcggaaatacatgttttttacaggataatagacatcccagaaaattgatacaaatggactgtggataatgaatataaacttcattccatccttaataattttaaatttagcttgatattcattctagatccacctcaagatatatcttctccatgaagctatcctcctacacctcagtgagtactgcatgacaagcacccacaatgactcagtctctggaagtcatataggaacaattcattctatcccaaatggcatcagagttttgtattgtcaggtaaattgatgcctaagaattgttggaaattatctgctatatgaaaccttctttcatccataagttaaataagaaatatggccacaacatccatgtagatgtttgagtgagaaactgagacatcatatcaaattgctttctttcttttccctaacatttcttcagcaaatcctgtccattctactttcaaaataaatctcaattccacccacctctctccatctccactgttgccagttgagccccggccatgcagtctctcacctacaagagtgcccaactgttttctctgctttcactcatcttcccactctctgtcttccatccatcctgggtgcaattttaaaagtaaagtattatctttttattccccagcttaaaacccttcaaaggctttccattgtttaaaaaaaaaaacaaaaaaaaaaaaccctaaactgcataacttggcctgaaagttccagtgacctatcctatctctctccaactctctaacttcaacccatggtactttctccctccttcacttcactacagcattgatgatctgtgagtttctaaatgtgccaagctctttcctacttcagagtctttgcgaggtaacagccagagcccagttagcagcaagctaacgacaaaaacgtcttagtgggggatgagtgagaggtactaattctatacttatgcatccaaaacaatactcttgtcatttttgactagtttgataatgatgatttcttatccaaaacctacacccttccttctatattcattcaacaaatacctattacatttatgtttggagaactttccttgttactttagaatacaaaaaaaataaacacaaaccctgttttcaaggagtttacagtccatcaggcaacacaagatttcttcgtgtgtaattaaactaagccaacatgaatcaagtaaacaggaaaagtataagataggctgtgaaatttcagaaacataaacaatcctggtatgataggtgaaggatcgtggaggaagtctatttgaggttcatttgaagaactgatagaatttctaaagacacaggagagatagggcgtagaaaagggtattacaggcagaggaagcaaaagatagatattgaaatgcatatatattgaaaaatgcacaatgtgtttagaaatagtgagtaaagagaaggttggatttgagacaaaatatgaaagcccacaaatagcagactaataataatagcataaattcattgactgtttactatgtgcaggataatcatttaattattacaacaaccctataaggcagcactatgattatccccatttttcaccgaggcaactaaagcacaaaggagttgaataatttttccaaggttacaaaactaggaagtagtgggaccaggatcaaaatcctggcagtctagcttcagagtacatgttaaacatgtaggaaattaaccattatcacatagaaatcaagattcattgaagatctttgagcaagaatgtggcataattggacctttgatgacttattctggttgcgatgtaaagaatatcctagagaagaaacaactaaagccaggaaaagcatctttatggaaccaaaaaagagcctgtatagccaagacaatcctaagcaaaaagaacaaactggaggcatcacgctacctgacttcaaactatactacaaggctacagtaaccaaaatagcacggtactggcaccaaaacagatatatagaccaatggaacagaacagaggctcagaaataacaccacacatctacaaccatctgatctttgacaaacctgacaaaaacaagcaatggggaaaggattccctatttaataaatggtgttgggaaaactggctagccataagcagaaaactgaaactggaccccttccttaccccttatcaaaaattaattcaaaatggattgaagacctacacgtaagacctaaaaccataaaaagcctagaagaaaacctaggcaataccattgaggatataggcatgggcaaagatttcatgactaaaacaccaaaagcaatggcaacaaaagccaaaatagacaaatgggatctaattaaactaaagagcttctgcacagcaaaagaaactatcatcagagtgaacaggcaccctacagagtgggagaaaatttttgcaatctatccatctgacaaaggactaatattcagaatctacaaggaacttaaacaaatttacaagaaagaaaccaaacaaccccatcaaaaagagggtgaagaatatgaacagacacttctcaaaagaagacatttatgccccctgcaaacgtatgaaaaaaaagctcatcatcactggtcattagagaaacgcaaatcaaaaccacaatgagataccatctcatgccaattagaatagcaatcattaaaaagtcaggaaacagcagatgctggagaggatgtggagaaataggaatgcttttacactgttggtgggagtgtaaattagttcaatcattgtggaagacagtgtggtgatccctcaaggatctagaaccagatacaccatttgacccagcattcctattactgggtatatacccaaaggactataaatcatgctgctataaagacacatgcacgcgtatgtttattgtggcactgttcacaatagcaaagacttggaaccaacccaaatgcccatcaatgatagactggataaagaaaatgtggcacatatataccatggaatactatgcggtcataaaaaaggatgagttcatgtccttttcagggacacggatgaagctggacaccatcattctcaacaaactaacataagaacagaaaaccaaacaccacgtgttttcactcataagtgggagttgaacgatgagaacacatggacacagggaggggaccatcacacaccagggcctgtcagggggtggggggactaggggagggatagaggaaatacctaatgtagatgacggttgataggtgcagcaaaccaccacaacacgtgtatacctatgtaacaaacctgcacgttctgcacatgtatcccagaaattaaagtataataataaaataataaataaatagccaatacaatattaaaggccaaaagtaagggtttagataagcactataaaagtgggaatgtaaagcaaagcctgggtaacagtagaaatcagagaacattgaaatggttggctatgagagaagaatcagcaaacaactcattcttaggtctcaagtttgggtggatagaaaaatggttgcatcattaatgtaaatatttcaaattaaacatttatttgaaagaaaatataggtggaattttgttttaaattatacggaatttctattaatgttgaagcttttgtggggcagatggtagagctttccagaaacagtagatctgaacataggaaagaggcctgacttgaaggttagggttggggtgtcatccctgcagacatggtgcaacttaatatccactctcaggacatcagaaagaggaccacggaagaaacagaaaataaaacagaaagatacgagcaaatagacagttgagtgtgatagacattaagaaagagcccattcaaaataaaggggaattttaatggtttcaagtgttatcaagaggtgaagaaaaatgaaaactgagaaattgactttttaataatttggagactgagagaagaaaccaggtaataaagatttccagacctcagtgtatgaagaaaaggtgtagatagtggtcataggtcattcaagaagtttggaggtaaaaagaaaagtgaacgttaaggtattcaactagtaaagtcaagcaaaatttttgtttattgagctgtttcaaggatggagattctaatgatgtctgcaaacaaagaaagaggtaaatggacaatgagagattaaaagttaaaaagttgcttaggcaatatttaagaagaagagaaagcacacttaaatgaggaggttctttttccccagggtagagaaaagaatgctgatgtagaagaatttgaggagtgaaattgagcggcttatgtcagatgaacttaacattctcaaaaaaacaaggttcatttgcccagagtaagacagtgggtgacaccacaggtaatgcgataaagaatccaagaagtaaacaaagcaagtaataataagaactagctaaaattaggcagtatgaacagagggaaccaagtaaaacagtgatgctactttctccagcaaaattagcattgccatctcagagagctgagaaagtagacatgacagttagctggctgtcatacccccagctacacactcagcattcaattactcacaaaatatttactcaacatccactgggtgctagaatcatgaaaacaatggctacacatcaatgtggacagctttggtccaaaacatggcatatcccacctcacccaccctacccacccactcacccaaagccatgctttcattacttgtgattactgataactcttggtgaccaactcataattaggtatgtgttaggactctggtagctcaggaaataggtcctccatgttataaacaccccaggaaatttagaaaagtatttggtgaaaagcgccttcatttaaggatcctagaacttcaaatgtggtttcttaataaatggtgatatttcaaagttgacattatggcttcacccattctgtccttacttctgttaaactcaaagctggtcccttcacctctaacagcatgctgtttttttcttatgcagttacttcacacaagcccctgccagtgatttcaccagggctatgtcctgccatacattcattgtttgcatccattcttctgttcatcaagcattcactgagtgcctatgctatgccaggcagtgggctctgtggttacaaaaacacagtccttattcccaaagatattatagtaccagtagaggaggaagagtagaagagtcacggtaaaatacagattaagtacagtggttaaaaataaaggagagagatcagcattgcttaaggggatcagacaaagtttcatagaggaggaggctctttgattgttgtttgaaggacaaggaaccattttccagatgggcgaggtatgtgtgggagaacactttggcagaaggaataacatgtaaaaaggcactggggtgtgaaacagcagactggatagacaattgcaagcagtccaggaggggaagggtggggatgtggaagagtggtcagggagagggcaggcaggtaagaaagaaatgtcaaccaggggaggacctgctactgacaagccgttctggggggtctgactttcttcctgtggcacagaggttattaatgctttggagtcatggctctttcaaaatctatgatgctatcaatcctctactcagaaaaaaaaaaaaaaaatcaccgaaatggtgtctacaaacactctgaagttcagaaattgcttggacttcaggttaaaatcttgttataggcaaagggctcatttttagttgataaaaatagctggaagtatgtatacacaacaagcagggcgtaacgtgatccaatttgtgttttagaacaacaattcagccaactttgttgtgaatggattagaagcaagtgagaccaatggtagaatgagcaattaagacattatgacgaccatctggtcaggagatgatgaaagaaactgccaagaaatgtttgaaaaagataagaatgattcaagctatcagatgtttaactgcattacagtaattaaaacaatgttatgctgtccaacaaaaagagaaatcaatgaattatattaaaaaactagatccaaaattttatattatgttttttcaaggtaaaacttaaaaagcaaaggatagattattcaacaaatcattattccactggcaagtggaaaactatctgagaaaaatataaagttaaattcttgcactcctatacaacaaaataaattccagatggattaagatttgcatgtaaaataaagaaactggaagaaaatgtaggaaaagtgtgtgtgatcttgggatgatgaagtcatttctaaactaactccaaaggcagaaactttaaaaggaaaacatcaaagactcaaccactgcccaggggctggggaagggggaaatggggatttgctattcagagggtataaagttccagttatgtaaaatgattaagtcctagagatttgctgggcaacattatgcccatagttaataatactgtattatagacataaacacattttaaagggcaagtctcatgttaaatgttcttaccacaattaaaaaagactcaatcacatgcacaaaaacttctcatgtaaaaatatacccaagggaaaaagtcaaaaagtgactaagaaacttggaaaaaaatatttacattataaacaacctatagacacatggattactatctgtactatataaaaattgtcagtaaaattaattggaaaataagcatctcaaaagaaaaataagtaaggaacattgataggcaatttgcaaaggataaaactacccaacctcactagtgacttaacaaacacagaaaaaccacagtgaaatgccattttccccatatcagattggcaacatttttagaaaacaacactacttaagatacgggaaaatgtgccctctcatgcactgctggtaggagaataaactgaaggggaaaaaaactttctggagagcaatttggccaaaaaaatcaaacctttatgaataactatactccttaacatacaagctctgcatcctaaggaaataatcctgatttaactaccaggagatacacaataatttttacagtagcaaaatattttaaatttcattggctaagttaatgttatttaaccattaaaaaactataaaaaattatcttggagaaaagtgtttaaaaggcatggatagatgttcacactagttcgttaaatgggggggaaaacagacttcaaaatcatattatcatatactagcctgagacaacaccactaccaccccatactacctaccatagctagacaagaaattctaggttggttgagatattaatttgaagtacaagtcagttgcattgatacaacaaatgataccaatatcgttagcagtaacagaagtaacaaagggaaaaaatacacaacaccgaaagcagcaggctgattcacagtgatgtgttaataagagaattcagatggagagctaagtttctataatcccttcattagtctaatgtaacacctctggtatagcacaatggaccttggtatgcctgctcatactggcctcttcaacctaattctgcgcctgccccctgccaagctttggcccagaaattagagaggaaaactacaggtagttagacctgaaaatgttgaagggacagaaaaagagatttgtggggggcgctggaggcctcagcactgccctgggggccttggcaaattctccaggaatgataaagattgaaacaagaaggaaaaccctacctcagatggacggcctgatggcaatgtggtgattgttctggtgtcacttcagcacaggagcacttgcacaccataccgtggcctccagctctctaacatgtgctgattgctaggaatcaaagtttgtatggagcagggcaagtggcatgttctcatccattgccaatataacattttcatttcaaatggtccatatggggcctctgaaaatctacaactatcatcatatggataaatttatcaatcaataaaaccatatcacatgcttcagaatagcatctcaagcaacttacattttattctgagatatgtcagcatagggattacagcctatagtagttaagcataatttgcaacggaaaaacatgtttctacttagtttgcctttgcaggtttatctttgtgattgctaattcctttgcttctcccctcctttcaaaactacagacaagagattcatcagaagactttactctgtgttgaaagcaactgaatataaagtagaaaagaaggaatagcttttgaaaaaaaaaagaaagaaaacaaatacccacacaaatcagtgtgtgtttaacaagggaagttatctcaaaggtcacagatctgcagaggaaacgtgctatttaccaatggcggggaaggaaaaatcccaaagacacataaaactcactctaaatatttgccactctgttttatttaagaccagtgtgtattagcaggggcaagctgagtacacactgaggacttgacaaggacaccaagctacaggatccagtcccttcatcggcagcgagaagttgctttcaacagtgcctaattggtttcagcagaattaccgttactatactaggagggtagcctcagagagtatctatcttactggccacagttctttgaggatatatgtttttaaatttactttgtttatagtatagtctaactcaattatttgggttgggttttctcatgattttgcttattatcattcatctgtaatctcactcataaaacttgcttgaatctattttgttgattcaaaatagattcattttaaatctatttgattcaaaattcatttgaatccaaaatagattggaacatttacatctgttccaaatagaagaaaataatgaatgatattttgttaaaataaaatgcaatcagtcaattcttaaagttttcattgatgataaaggcatcctctccatacattaaaccatatgtgactttatatttaaaaattcaaaaaataattacttaaaagcaaaatcattcatttaccagaataactcagaacaaaatggtaccgttaaagacctgacaggatttcttggaacagaatgttattagttcataaatttaaggcaggcacacagatgtctgccctgcacataacataaagcattttgcaacagaaaaaccttcattcatattttggccatcaacactactcaataatcacaccagcaggaggtttagactgtgttcagtgttcttctttctcacacattcagacagacaaagacgtacactttcattctgaagatgtccatttggttttcccccacgtttcatcaacaaactcatgcctcaccgaaattccttttctgacttacctcaagcatacaaatctggaacaggagtgttgcttcagggaagccagcatcagaatgggatgaaggaaaatgaaatctcagtttctaccaagaatacaaatctctgacatttgatagcatcccatctaatctcagtgctttcatagcagatattttaatgaaaacaattcaagctcctgacgcaacagagggtagcctttgcataatgtttagtttctaatgcctccaaaaggtatctgatatttatttatgatccaaatatattaagcctgaaatggaaacacttctagaatttccaaagagctttcataaagctgcctgaataattattagcaaataagttagtagaaaatatttttaagttccactattgtttctttggttattgtttgttctccccatatcccccttcacccacccccccaactgcccgcgcacacacacacacacacacacacacacacgatcatgaaaatatgttttaaaagagttaaacacagaaaccattaatttgctaaaatctccctagatcccatttttaaagatcacctggaaaaatcttaggattttaaaatgtcccaaattcagaaaccagagattcaagtgcaaaggtcctataggatggccactgagaaagcttcatttggtgttctgaaagaaacaacctccttctaaatggaattgaaaagtgagaaaccattattctctctcttcataataattggaaatcatcattctcagtaaactatcgcaagaacaaaaaaccaaacaccgcatattctcactcataggtgggaattgaacaatgagaacacatggacacaggaaggggaacatcacactctggggactgttgtggggtggggggaggggggagggatagcactgggagatatacctaatgctagatgacgagttagtgggtgcagcgcaccagcatggcacatgtatacatatgtaactaacctgcacattgtgcacatgtaccctaaaacttaaagtataataataataaataaaataaaaaataaataaaataaaaaataaaattagggataagctcttgctatattgccaagcttggtcttaaactcctgggctcaagaaattctcctggctttatggcagtatgatttgtagtcctttgggtatatacccagtgacgggatggctgcgtcaaatggtatgtatacatatgtaactaacctgcacattgtgcacatgtaccctaaaacttaaagtatgataataataaataaataaaaagaaaaaaaaagaagtcatatgtgggagtttgagggtttataaaagagttttcatatgattgtggtgatggttatatgaatgtatacatgtgttaaaatatatagaactatatacaccaaaaaacaagtcaataaaattttttttcagtaaaaaaaaaaaaagaaactaaagtaaaatcctgtttaactggaatctaaataatcagaagttcacataccataattttattgtcatttttatgagaaagagacaaataaaataaagcagctgattcagatacttacctttttaaaaaaatctgttaagatatgattggtggggattcaaccccatatttagctcatatatatcaaaagacttctaaacctgtgattgatattcatgacaatgttagtattaagtacatttcactatcttctaggtattcaaaaggtggttttgccccaatctgacataaattctaaccccatgttaatcactatataattatttaattaacctatccccagcctagtttggacaaactgaattcacaacaaactgaaaaataggggttagttgttttacttggagaagggagggacaaaagggctgagtgagccatttaaaaccataattttaatatgcagcatttctttgtggaacaattaaataacacaaggttagagaccaaaaaacttgtatctgcaatttactttatatcaaaataaatttgggaaaatcacttaacctcaattttaccaaaagtaaattagggccactattatacttcttctatctcccatgacacaagagtatgacataaatacaagtttcattgacctggccaaattgaactggataaagataattggccatatacatggtgatatctatcttcaactgcagaaaataggatgaaccaatgatttgactacaaatatataaatgctatctttatgtctttatatgggtatattagaataagatgcttccccaccatcaacctgcagttccctgtaaggttaccaggccattactattactgtcgcctacatataaatgacaaagcagaagcaaaaatcataaaaataaatggcccaacatagaagatgggtcaaaaatagaacttataatcttcaaagcattaaagatagtgctctgcattaagtaagcacttaatgtattcttggagcagactcttgaactgacaccccacagttctggagatcactaggcctcctaagcaccctatggtagacggaagcccagtgtcttgtcaaaaatcctagatgctcaaatgcgatgaaaattacataaggaatatatttctgctactgtttttgatcactttttaaactgtttttattgacatgtaatagttgtacatatttgggaggtacatgtgatattttaatacctgtacacaatgtataatgatcaagtcaggaaaattgggatatccatcagctcaaacatttatcttttctttgtgatgatcatgtctttttgcccctgtctcttttttggcctctttgctacttctataataacacaagtttactccaagtgagttcacagcaagcaatatattcataatagcagaggcccaagttataattctagtcttggccgctctctcaataactacaggcctttaggacgtcataatagatgtctttattttcccattcttagaagggattaaaggtggaatttgaccaaaaggcaactgatattaaggatgttggaaccactccatatctcccaaggaggaaaacttgcagaagtttgaatggagttgagagatttttaaaagccaaagaagaattcccttttatccctacttccatgggaccctctgctatgctgccgaactctctacagagacaaaagggggaaactggaccagttacattatcggctcaataatgtcttacagcacaactgatacaggatctttactgaccagaatgcctggatgatgttttgccaggtttgttgaaaagttatgctacgtaaaagtgaaacagaaatattattatgaactatgtaatgacaataataaagacctcttctacctggactctcaaaaaaacaggaaaagtgaccaaatagtttttctcaatagcccaaaagacagtccaaacagttttaagggatggttcaattaacagcaaaaattcatgtttcttattccttctcttggaaagaattaataagcagttaaatgagaaatgataagaagaaaagcctcaggatttggatgtcctataggcaagaatacacagcccctggaattttgtaaatctctgagaaaacactaaaagtttacttatccaaagaaccaagggcaaaatccacaattgtcttcaactaatttaagtgtcatctcatttctcaattattttcaatgtaattgatcacattgaattacattttgaataacattgggaaaaggttggactgcagatgcatgttttcacttcattttccatcaaagaaccaaattaatctgcaggatattatgagcacattatccagcaatagcccgccacatgtctgcccactctcagaagacaatgtatgtcttatcttcattcaccgattccacaaacatttcaccaacccagtgaaaagcccagggtaaagaagacaatgatatgaaccctgtcctcaaagagtttaaaatttggtacaaaagatatgtttgcatgccaaattaccataacatgaagcaaaacgtaataactgccacaaatgaggatttaaaaaatgcaaacacctatggcatttcagaggcaacagctacattatggaaaagggaacatttcttgccattttaaaaatcactcgaaaaagtattccaggtgattaaacagatctgagacaataaagcatcatagctgaaggaagaaaaaacaaaattaaaaaattgtttaaaagtagcatcttcatgttttcattcaactatacacaccccagaaaaacgtaaaatgtggccagatttctccagtcaaacttcttccattctctgtgagaaagctaggttcaaatgcctccacaatcctgagattaaaatggaaagtgagagaaccttacatcattgtacatgtgcattggtcaaattacctttaggattaaaaatcatatttttattttttcaattaacactgtaaacatgggcagtcagaagcctcttacctttgctgtttaattatccatctgattgcagctcagatcagctctttataatccaattttgagaaaatgatacatctatttaaaagcacatatagcttgttttgttcaagtagaaagtgaccaaattctcctagactgagaaaagattggcatgtttgcttgtgcatatcagattgtgtagtcgcaaacctgggaattattccacagatgtgaatggatttctaatttatgtcacaaaggagagattatactcttaggataagttatttacttactcattttcctaattcgatttcaacacacatgagaacttcaagtcaggaaagcattgccaacaatgcttcaacagagacaaccaaaaagagatcataaatgtcttattagctgtaaataatgataaaaatcaaatctttgggaatataattacagctggtctagcttaaagggttttacatttatattagcccaagtaaatcacagtatactaattttaatttatacattcaaataggtttgttgtactggttgccataaatttcaaaacaagaaaaatcaagaaggatcagcttcgttattttttttttaatcacattttccaattgtaaggtccatagctcctccttttctgcctgttgacaagtgtacttctcccgctttctaactttaagtacactcctctctgcagtaacttgtctgagcttgtttgtcatagttcttactggcaatttctaagctatcctttcatgatcttttgaagaaacaatgtataagtgcacctgtgttattttatgttcatgccttccccttgttttctttccttggcaccatagaagcagacatacatgtctgtaacttatgatggcttatttattatttttacctgcatatattcagaaactatttttaagaaaaggactggactgataaatcagggctaggaagcctggtcattgtgtgggcttggacaagtgatataattcactagaactatattttcaggtacaaaatgaggacgaccctgccagagaatcaatcatcaaaactgcgacaactctgaaactgtatgactctctagctctttgacttcggacttcacacttagatgtcatttgttactttaaaagatggttggttccattgtggaagacagtgtggtgattcctcaaggatctagaacctgaaataccatttgacccagcaatcccattactgggtatatacccaaaggattataaatcattctattataaagatacacgcatgcgtatgtttattgcagcactattcacaatagcaaagacatggaatcaacccaaatgccgatcaatgatagactgaataaagaaaatgtggtacatatataccatggaatactatgcagccataaaaaggaatgagataatgtcctttgcagggacatggatgaagccagaagccatcatcctcagcaaactaacacaggaacagataaccaaacaccacatgttttcactcgtaagtgggagctaaacaatgagaacacatgacacagggaagggaacaatacacaccagggcatgttgggaggcagtgaggggaaggagagcatcaggataaatagctaacgcatgcggggcttaatacctaggtaatgggctgataggtgcaccaaaccaccatggcacacatttacctatgtaacaaacctgcacattctgcacatgtatcccagaacttaaagtaaaataaaatttaaaaataaagatggttggtctttcccctggtagatataaacacaaagacgaagcggcacatacatgagcggggagtgtaaacaagagagaaggggtgggggaagaaagtgagagagaaagaaggaaaaatgaggcaagagagacaaaaacccagagacaaggcagggaaagggtggggaacagggtgaggaatttagagaaagaggagagaatttgggaaaacagaagagtgtatacagtaagagagctaaagaagaggtctaattaatagtatacaaccaattatagggtataaaattttaaaattcttgcatgcattttttgcatgtcaacaaatacctacaggtgttagtttctctccagaaaagaaaaagcaaaatacttggatattgaagtgctaattttaaatgtctgtaaaaatttgtgagggaacaaagttattttctattatgaatttactaaacactagatgacattttaagccatcatatgttatcaataaaaattagcacaagagaaattccagcacagggcacaggatatagtaggcaataatataccttagagagagagaagaaggaaaatgagagacagaggaaggctctattttaaaatgacataaatcattttcctgatcttgaagactaatggagatagggagaaaggataaaataagcccatgtaaaattgcctagactctgaacaagcaacaagtacaaactacagtaaaaagttaaataaccagaactcaattaactacaattctcaatttgctagaacacatccacacacctttacagtccagtattcaaggagacaactttacaaaaaaataaaagatttcaatgttcatgaaataataatagcaattaccaccaccaccattagcaactccctaggaatgtctctggagaacagtcacatctagtacctacagcattagagtccagagaacaataaccactgttgttacacatgcagaccaggaggccattcaaggacctctgcgatcaagtctagttactcaaagtagtgcctgcacttcgtagtcaatgtgttgactgctttaaatggtttcccactggagagttagaaatgtcagcccatgcctaaaatttttggagccagggttctccagccagtagcccactcccttctcttctcttccccaccttcagttcttttctgcagtgaggggccttgcacacacccccaaggacatctcagcccaaacatctaagattcatgcacagccccacactctttggtcctaggagtgctcaacacaagtggtacagttcaccttcgggagatgagaactcaagagagacccacgtaggccctggaagtcatcttgggatcacttaggtaggaattgtggggtaccaagtggtttagaagagggaatggggtgctttggattgacaatatccacatggctctgcagaatcgtctccccataaggcatggcacagtggaggaagaccagtagggccctctaaagcaagtgacacgaggcaagagcctctttccccaggtttaagggtgctactgttaacatggcatttctgccttaacctgggttagccaggaaatctaattagccatatctcattccatgcagccagactgaatagtatttggttgtgctatacagtgaaaataaacaacctaagctctaaaattactgtaactcaggtggtcaaatgattttggttttaatcccttggaatccctgcccaattagcacaagaggatgaattttcttcagcaataaacccctaaatgcctcatgcatactgcttaagaataagctagcacaaagagaacctttactctcagtgaccaaacagagagtaaagtttttgtctcaacttctccttccttactctcagtctacaaaacatcatgcaaggctgacccaaggccagaagccaaatttaatggtgagcctcccctcttgttctctcttcttgtaatacctcatcctgacacgcccgagttatcctctgtaggaacacaagaagatccactttcccaaaacagtgtcctatacctctgttccccactctctaccacctgattttttttcttgtctttttgggctttaatctggtcacggtcaactaactaagagaataaactacttaccatatactagtgagctagtgagtgttatcagtcgaataggtcatctacccaacttaattaacattgcaaaaatgaggtcagagcagtggaggcacacaagctccttggaacacttcgaataaactgtacagcctgctcgactgagagaccaccacatatagacacagtagaaggaatacataaaagagacgagacttgtcctaatagatttgcagtacagctgagagacagaatctatataacatggaaagagctttaataatattataaaataacacaaggatacaaatcagtgagtaataaggcctttttccctcctgttttctaatgtactcccaaaagtctcatctgccataagctttccctgaaattttgatttaagagatagaaggcttggcctgaatagtaaaagaaacagcttggaagaatttagacacatttccttccttctctgcttcctcatgtttcctgtccttagaagttaggccttttgaaggatgtttggaagtgttccctgcatgtccatgtgcttctgctacctcagtcttgtttttattactataatatatcagggccctcaagagttatctttattcttcctatgtaagagtgaatagtaatttcatttcagtttttccagctgttcctttatattgttctgccccatgacttcaaaaagataggaaacccttgaagtcctagaatcctagactcagagtcagaaagcacacattcttattctagttctagtgcttagtagctgtgaggaaattatttaactcttccgagtctcaatgccgtctgtaagatgggggcctgtttcagcaaatgccaaatcaaatccctttctgcgagagcaaacaacatggtgctgcttaataggcatggttgatgtgagcacttgtggcagatattctctgctttggaatttctctgaacaagatccgattgatttgtttattcagttaacaaatattttcttgagcacctaatatgtatcagactctccactgagcgcttattagaaccactggagctatgagccatccagttgctactggacagtttctattttcaaattaccacttttctagtgttctcccttttggagaatagctaagaatatgtgtcatggccaggtgcagtggcttacacctgtaatcccagcactttgggaggccaaggcgggtggatcacttgaggccaggattttgagaccagcctggccaacacagtgaaaccccatctctactaaaagtacaaaaaaattagctgggcatggtgtcacatgcttgtagtcccagctactcaggaggctgaggcaggagaatcacttgaacccaggaggcagagatggcagtgagccgagatgacaccactgcactccagcttgggcaacagggtgagacttcattgcaaaaaaaaaaaaaaaaaaaaaagcaaaagaaacaaagaatgtgtgtcatgttgcttgcttaaattctattcgcagcattttggaatgacacgtctccctctcctggcttcattatacatcaaaattcccaaagttaaagttttttcaagacataagtcagcatagtcgctaagaaattctcccttgggcttgatagaagagaattaaaatatatctggacttcatcaagtctggttttttagtctgtcatgggaggctggagtcactagggataaattaaattattaagaatgaaagtttccaatagtgtaaaggagagacgtggtagtgagcagcacatcaagataatgagtgagcacacgcaccacacccggactcatggatacttatgctgcaatccataagtgcacctcctcaatatgccacctctgaaaaccaaaaatgtaacaagcaaatatcagaatagtcattcctgctcagtggagtccctagcgacagtcaaataaaagaagacgagcttctttgaagctcgaaaacaaagagcacctttccagtggacaactaactaaagtggtgtgattttggtataagtttgtgtgtgtgtgtgtgtgtgtgttgtgtgtgtgtgtatgtgtatacatttagttttattgtaacaaagcaacttgtacttttcacgtttaaaactgagcatcatctttcctttacagtgaaacaaaaagaaaacttaaaaataagcaggaacaaaattacaatagagaaagtcaattccaaataagatcctacaggttcttctgattctccctttgagtggcagggctcaagtcatcattaggagataatttattttaaaagtgtcatcttaaactacaaagatgcctgttaaatatcacaataaacatgccaaaggagaagccatgttgtcaaaatgcccacttaacctacccaaacatctcagatccaccctttgctgaccttctataatcccattttgttttttagtttttttctttttttaaacaagagaaaatagacagatacatgttggtaaatgctaactgtccatattcacatagagacaccgtgtactctctaagcccaagatacagagaaaggagggaaaaagctagaattctatgcactactacacaggggcctagcaccctccagcttccagcagaatgaaaggagcaggtttttcttttttcccacagagctcggtggtgttgattccatacagtttttgttcagacagaaagggataaaaatgaatttcaaacagaaaggcgtagagacacttttcccattgtattctgcaataagttgagaaccatggtgtagagcaaagagacctcaacaacagggcaacagagcacaagaggaaaaagaaaagactggaacttgctcccagggactggagaaaaatttttaaacaggaaagttggaacctatcagtgttctagtaatcttttccttcatccttctctccttcctccccttcatcatcatcttcatcttcaccttcatcttcattgtcttcttcattagtatctttttatccttcctcctcttcatcatcatcatcatcttcttctcattctgcttcttcatcatccatatcgggaaccaagtagtactgtaatgagtttgaccaaatatcatctttggtgacctctcataactcatcagcacctgcatcagaatggtcagtaaaccaggtaaagaagctctctggttcctcatgctgcctcttcctgctggctttattctgcatttgacttgaacatttcatcaaatcctttccagatgaacatttcatcaaatcctttccagatttccatttcatttcagtggactttgaagatggatcaccactctcattcagatgaaattctttggatagaagtttattttcaaagtaaagattttcatcaaaataaaaatctattctgtaacctgatttaatatcttcaaattctgtcatttcaactctgctcaaataatgcagtgcctcttcatcctcctccagcagggcagacacttgtggatgcttgacaaatgttgttaccccaaaatttgggattttggcgatcaattctgacatcttctgaaaaaatggttggcagagtttgtcatatttctgttctactttcaaaatctcctcactggcttcttcattaagtctgtctatttcattttgtacttcatcaatgcattcaattgcttcttgctgttctttttctcccttcctcagcaagcctgcagaggccaatgtctcctccggtcccagagcaggaggcattcttggtttcttcttttgaggcaggagtggagactggcatttgggggccatgctgctagggaagtccaagaaccagaccacaagtctccttgctcatccggaagcaggcagaacactctggtataagatttattggttaaaattgagcaataacacatgggtatttgaaggatccctttacactattaattccattcttaattaatagcataaatgtccattcttaattttataaatgcagaaccatttataaaaatggaaaagccatagctgtttggaccccccaaggaagctaatcaacccaccaagatagaacaggagtttgtaaacatacctttggcgtaattgtttgataatttattatataatagttagttctttaacaaatggcttttattttccctgatctaaattaatattagaaggagaatgagtgctctcaaaaaatgggagaaaatgcagaaaataacattattttcccttcaaacatccatcttctccatatgcttatgatgggtgacagaaagaggaggaaaatcaggcctcccaggaaatacacagttggggggaatccctgccccaaacatgcataggcagggctaccattttgcacaatcccacttatactcttggtgaaatttacctccaggactatgcggtgcacaatctgcctgctgtgcacagggactctatctacaggcacccaatagtccacgaagaggaaagtgcacctagcccagggaaataatattgtgttgccctgcgggctagttcaatccaaagggagtcaaggaaaagaaagagaaagtgttcactgactttaataattattcaagattcagaagtatctgggaattataaaatatttgattctgtaatcacatcagaggaaagcctttccatttgactgattctccaacaaaccaaaccacagagggaatggctgagcaaacagttttcctaccttcatgctcacacacatggtggaacataccagcaaacaaaaaaacattcaccagatttcaattgatgaaacacactgggaagaggtgccttccctttggttgactttaaaaacattaactgatacagtttaagtttttgtttcaacctacaaaatagagttgttaccttaaatatatgacatttaaagacaagggatttctatcagaccagatgaagaatacgctggacctcagtctggtgaccaagcattattcacatgagaaacgttcttaacccaaacacttcagaatggcataggaagcttgctttactgagatgctcaaggatgtgttagaagcaggatctctgaaaagcaggagtgaaaaggccaggaccactctagggccaggtatccctaatcagggggctgatgcttcagaatgccctctcctgcccttctccagccatgcctctccatggaaccagcagtctgcagggctgtgatacatacccacctgcagggacaacttcccttctagactcttccccaagtactcatgacccttgaatttcctgccccaagtggtccgaaaccagcttccagggcctgggtgtgtcttcaccctcccgaagcagatcaactcacaggtgtgcgcacccctaggcctgaggggtgttcatgggcagctagtggatgtgggtgtgaataaagttgaatgagcaggctggctcacccacacacattcttacaaggatcctccagttgcacagtggagccagggcaagaagagaaggaataggttgtggaataggggggtcttgtcctgggccctcaaatgttaggggtgagcctggaatgggataaatcatataatgaaatgagtactattcagtgatccaaagaaaaatctcctctctctgtttcctatcctcacggtgaccacataaacggagtatctcaaccaggacactggggagcatgaaaggtatcttaactagatgggacaccagctcaacaggtgaggccaggactgtcttgcaaactaggatataaagtcatcccagctacaccgaactgtagaatagtgtcttcccttaagatgatcattcactaccactgagcccagagttccataaatcattgccatccattggcatccagcattttccccctcattgggttcttttcctcattagagagtgtttgtgtttggtgtaccaagaagtaaataaaacctcattttcatcatatacaacagactttgggcatataatagaaagcatcatatgtggttccaacttctgtagttttcctacaaagtttgctcaatcttttaagtttgtaggttgacattccaaataaaaggagtagaaaataagaaggaaacccgtgaaacaagagaaccatcagaaacccctgcaaactcaccaaagaaagttggatctagggattcctgcaggaggtagaaaatcaaagataaatagtatatggaattttaaaagaaaacattgtggatggccttttctggagcccagcctgcactgagcctatgcatacaggatttaatcaggactagtcagtgcaatccagacgtgcacaccctagatgagggagtttctaggaaagtctatggccacatccttggcgtctagttaatgtgtctcccgtgctgcttcttggcaaattccagtagcctgatcttatctcatagctcttgcacaatacacacagacacacacagacacacacacacacacaatttctacagtgcttccagccagtgctactgttcaccattatttacactagcagctcttaaacatgaccacacatcacaattatcctgggagcttctctaacatacagattcccaagcagctccccacagagactgaatcgggaggtcttgggtgaggctgggacctttctacccttagtaaacaaacaatccagatgactataaaagcaaaacattctaacccctggagaagctctgctagagcagtacaggctgaattccatctgaccagcatgcagtcatgccctcttgctgtttttcttggtctattcctactttgaggtcttcccagaaagagctgaagatgtgctgcccaacaccatggagacaaggccccacaacaaacagctgtcctttcctgccatggccaaactccaaccaactgccaattcaaacacgtcctgaaatggctctctatccattgactttcatgagaaactacttgagctttattaagaaataaaatacacacatacagcaagttatgaaaattttagaatggttcctcttttttatggacagtctttagtttctaatccaacaataaaatgattccttaaaatgaaattttaacccatttctttccttctttctctctctccccctccccatcccacacacactcatacaatgatctgtgggctttttgttaaattagtgattctcaatggaggtccaacccttccagaagaacaaatcaatgtctccaggaagccatgtaatttttctgtttgtgaaaatgaaccaagtgttttcaaagggaaagaaacactgccagcctcatctttgattcatccagaatatggatgggagaaaattatagcaatcaatcaacttgaatttcatgttttacaaatggtatagtgtgatcagaaataagccaaaatttataagtaattggcatagaagaattaataaaataagtaaaattagagaaatgctatcaggtaaaaatccctccttaacagtagagaagcagattatgagaatccagtcatcactctggatattatcatcacaggcaaaaatcagctaagtcagctgttgacagagcagaggaagttaaaaaaactctactcctctggcactgttttgaagttcagcgatactcagcttggtaaggcattcagtgcactgattgttgcttcccctggaagcagtcagtgcctgtctcctgtgttattcccacagatctcagggatggggccattacaagacagtccctctgatcttggctgccaaaaactcaacatagcgtgatagtggtgcctcctcgccaagagagaaaatcagtgctaaacatggtacccaaatttccactcatcatactgtggtggcattagaggatatggagctataaaagctaaaaaataaaaaagcaaggccaggccaggcatggcagctcacacctgtaatcccagtactttcggaggtcaaggtgggaggatggtgggaagccaggatttcaataccagcctagacaataaagtgagatcccatctctataaacttttttttgttttttcattagctaggcatggtggcacatgcctgtagtcccagctatttgggaggctgaggcgggaggattgtttgaactcaggagttcaaggttgcagtgagttataatcgcaccactgcactccagcctaagtgacagcacaacttcatctttaaaaaaataaataaataaaaataaataattaaataaaaatttaatttattaaatgcacccgcttgcttcctgaaatatgccaagctaaagaaatatctcttcaatatattagtccttggcattatttcactaaactatttcattaaactaacacctcattcctcttgctctattgttcttttcactatgctttagatcattttcctaagttagtttaaaagtgagactaaatgctcaccctccataagtcaagacttccttaaaacataagacataacatacatattattccacttgtataagcataaatttgacatgaaatagcttgaaacaaagtttggaaggatgtgcatggtgacattcccattggttcatttaagatggtccaagatttctgttcctgttacttacctcttttctactagaaacattaattatttattatttgtatgctcgtcaagcttttaaaaaaagagtgggaaatattgaagttacttaccaatggaagctatcaatatctgatattataattacagaagctcctcaacttacagtgggattatgtcctaataaacccattgtaagttgaaatatcattaattcaaaaatgcatttaatatacctatcctaccaagaatcatagcttagcctagcctacctaaacatgctccaaactcacattagcctacagttgggcaaaatcatctaacacaaaacctactttataataaagtactgaatatctcttgtaattttaaatgctgcagtgaaagtgaaaaaaaaaaaaagaaaaggaagagcaaaatcaactgcaccgaacaatgaagggacagagtaattcaacaggaagggaacagtttctactgaatgcatgtaatttcacaccatcataaaaatagttgaaaaattctaagtcgaaccatcatgagttgggaactgactgtatttcgaaactctaggaacaaatggctaacattagacttctgactatatcatttcttttgctattgttatccattgtttgggtgatctgccattgccaaaatgcatctactaggttgaatggaagtatttgtccacaatcttattttaaaacataggaacgagatggtcataaatgagaggttacttaccctcctgaaacagccactaattccacaaattggctgcttgttgttcaagacagagaccctcacggataaagtaaataaggatttatcctatcaatgaattgaaagatgcattcatttaaaaattacttgatatcacaattggcatttcaattttatagttcttcttgctctcacttttcttagagattgtacaacaggaggcagataccaaatatgttccctaagaaaatttagaatggctctattaatctctctctgacttcaagacaatgtttaaaaataaatgtctggcttaacattttacaaatgcatctttttaaacattaatattttttctgtgcaccacaagagagaaattttgtattgaatctaagtcaggagcaattcaatgagattgaaatcacccaagacagcctccatctctttatctccatcacttggaagatttcttgattacactttggagctcattatcaactaggattgtctcattttcaagatctgccagtctcaaatttttcaacatttcctactctttccctcctgttgaatttatcctgccccttcgttgttctcagtagttgattttgcccttacttttctttgttcttccagtcttcttaaactgggatacaaattcccagcccacccccacccagtataggcccttgtcatggaaaaatatggcatatatattttaggtgtctatttactgagaaatcaatcacctactagcatctactactttattttaacagatctgcactggaattttaaatatttttttattttattttattttattttatttatttttgagatggatttttgctttgttgcccaggctggagtgcagtggcgtgatctctgctcactgcaacctccacctcctgggttcaagctattctcctgcctcagcctcccgagtagttgtgattacaggcacacaccaccacacccagctaatttttgtattcttagtagagacggggtttcaccatgttcgccaggctggtcttgaactctttaccttgtgatctgcctgccttagcctcccaaagtgctgggattacaggcatgagccaccaggcccagccctggaattttaaatattttaaagttaaaacttaagacttgagaattttccaacttctaagaggctacttggagccccagaaatgtgctttccttcttctctgtcattatggatatttcacaggaaccttgttcagcctcctcttgccttcacagcctatggtcaaccatctccaactgaattctctctgaactctgagatttcctagtattcttaacctttcactaaaagccatgcttacactggcccaatccatttcttctgccttaattctggggtgtcacattttctctattagtccgttttcacactgctataaagaactacctgagactgggtaatttatgaagaaaagaggtccgattaactcccagctccccaggcttaacaggaagcatgacttgggggtctcaggaaacttatgattgtgatggaaggtgaaggggaagcaagcacgtcttggcatggcagagcaggagagagagaaaggggatgtgctacacatttttaaatactcagatctcgtgagaactcactcattatcacaagaacaacaagggggaaatccacccccaagatccaatcacctcccaccaggctcctcctctgacacatagggattacaatttgatgtgagatttgggtgggaacccagagccaaaccatatcagtcactaaggaaagtcctatgataataccttgtagaaccaagccactcaaccagtccaaatgctggtcctccctcactggacagtcccctttttcatctctaatacacatcctaactttctttcttttttcttttttttttgttttttttgagacaaggtcctgctctgtcatccaggctggagtgcaatggtatgatttctgcttactgcagcctctgcctcctgggctcaagaaattctcccacctcagcctcctgagtacctggaaccacaggtgagtgccaccacacctggctaatttctatatttttaataaagatgggattttaccatgttgcccaggatggtcttgaactcctgagttcaaacaacccacctgcctcagcatcccaaaatgcagggattacaggcatgagccaccatgcccagtctacatcctaacttttcaagccctttcagattctcaaatatacttctaactttctcaacaaacagcttcattgcccactcaacaaaaattgaggcaattctaggtgaattatctcaatttttccttccttcatatgaaatgtcataggtcatcacacacagtctctttcttgccttcagtttttttttttaagagtcagggttactttttaagtagctggaagtataaacatgtgccaccatgtctggctaacttttttttcctttttgcaaagatggggatcttactatgttgcccaggctgatcttgaactcctggactcaagcaatcctcctacttcagcctccaaaattgctgggactacaggcatgagccacccactgtgcccagccttccctccaatcttgaagcagtgtctctatttcttcctgagaccaatccctccagccatgctcctgattctatccctgccagctctctccatcgtccccaccatttcctgcatcttcaagcctttgcctttacctcctggatgaccaagacaattgcctcttttggagacagatcatttctttaccctgtttctttcaaagttttccttccttttattgccaatctgcttaagggaatagcacacatttataaaatccacgtctttcttcccattcttcctgagccccataaataagcatctgtcctcaccaagccaatgaaccattctcactatggtcactaagaaacccactcatcactatcccaggtctctgctctgaatttgtctgccttgtttgtgtaaagaatggccaagtccttcttaagcccttacttttcttcctttccttcactccaccccctcctgttctgtctcctacctctctgactgctcctacccagtctcagtcaccagctccccttcatcttcataccccataggcaacattctccaacactcagctttttcttctacagcttctctcttagtgactgcatacatcacatgtcttcaatgatcatctccatgtagagggctttcaactccagagcctccagcccttatctgttttattgcactttgctttattgcactttgcggatactgtgttttgttacacatcacaggtttgtggcaaccctggttgagcaagtctatcagcaccatttttccaacaatgtgtgctcatttcatgtctctgtcacattttggtaattcttataatatttaaaatttttcattgttattatatttgttagggtgatatgtgatcagtgatctcagatgctactgttgtaattgttttggtatgccacaaaccatgcccatataggacggcgaacttaatcaatgaataatgtgtattctctaactgcttcactgactggcttttcccagaaatctctcctctcctcaggtctccttctccctgagacacaacaatattaaaagttaggccaattaataaccctacaatttccttgaagtgttgaagtgaaataaacagttacatatctcactttaaatcaaaagctcggaatgaataagcttagtgaggagggcaggttaaaagccaagaacagccaaaagctcctgtgcaagttagccaaggtgtgaatgtaagagaaaagttctgaaagaaattaaaagtgctactccagtgaatacatgaatgataagaaagcaaaacagccttattgctcatatagggaaagtttgggcggtctgaatagaagatcaaaccagtgacaacatttccttaaaccacagcttaatccagagcaaggccctaactcttcaattctacaagggctgagagaggtaaggaagatgtagaagaaaagtttgaagctaacagagattgattcatgaagtttaataaaataaactgtttccataacagaaaagtacaaggtgaagcagcaaatgctgaggaagaagttgcagcaggtgaactggataatatagctaagataacaaatgaaggtagctacactgaacaacagattttcaatgaaggtagctacactaaacaacagatcttcaatctagacaaaacagtcttatattggaagatgccacctaggacttgcattgctaaagagaagtcaattcctagtttcaaagcctcaaaagacaggctaactctcttgttaaggaccaatacaggtggtagctttaaattgaagccaattctcatttacaattccaaaaatccttaagcccttaagaattacgctatatcaactctgcctgtgctccataaatagagccacaaggactagatgacagcacatctgtttaattatggtttaccgaattttttaagccttctgttgagatctactgctccaaaaaaaaaagattcctttcaaaatattactgctcattgacaatgcacctagtcactcaagagatctgatgaagaactacgaggagattaacattgttttcatgcctttaacaaaatattcattctgcagttcatagatcaaggagtaattttgactttcaaggcttattatttaagaaatatatttttgtaaggctgtagctgccataaacagtgattcctctaatggatatgagcaatgtcagttgaaagccttctggaaagaattcaccattctagatgccattaaaaacattcatgactcatgggaggaggccaaaatgccaatattaacagaagtttggaagaagtgattccacttctcatggatggctttgagtggttcaagattttaggggaggaagtcactgcagatgtggtggaaatagcaagagaactagaattagaagtggagcctgaagatgtgattgaatttctgcaatcccatgataaaatttgaagatttgaggagctgcttcttacacataagccaagaaagtggtttcctgagatggaatctactcctggtgaagatgctgtgaacattgtggaagtaacaactaaggatttagaatattacattaacttagttgataaaaagcagcaactgggtttgagaggactgacagcaattttgaaaagttctgtgaataaaatgctatcaaacagcactgcatgttacataaaaatatttcatgaaaggaagagtcgattgatgtagcaaatttcattgttgtcttatttcatgcaattgtcacaaccaccccaacattcagaaaccaccatcctgatcattcagcagccatcaatgtcaaggcaagactctccaccagcaaaaaaattacaacttgctgcaggctcagtgatcattagcattttttaacaaccagtatttttaaattaaggtatgtactttttttagatataatgctatttgcacacttaatcaactacagtatactagaaatgtaacttacatacattgggaaaccaaaatgtttgcatggcttgccctattgcaatattcactttattgcagtggtctgaaactgaacccacaatactcccaaagtatgcctatgctgagacactagcccattactatggcctattaggtatccccatgtagcgagcccggggatagtctggtaggtggaacagaatgagcatttttaccgatagttatatggttttgggcaaaccatgtaacacctgagtcccaattagcaataataataatagtaccttcctcacagatttgctggtgaggattcagtaatatgggaaaataagtttatttatattgattcagcaaacacatacagtgcttactatatgtcagaatggcttataatactttataaataataacactttacaaataataactaatctaatcttcacaatgatcctgtgagggaaacgatgttaaaattcccatttcacagataagaaaactgaggcacagccaacttaggtcatttttcccaggtcacacagctaataagcagcaaagcctgattccaacccagacagtctagcaccggagttcctactcttgatcactgccataagctgcctccaatcatactgcctttctgcctttgaaagcactatagaaatctaattattattattaaatgaaaaatctgaaacataagcacacccttgcacttcgattctctttcctgagatccttgttggttaaggacatcaatcctgtaaactacaacctcattaccagctttactccctctcttaccctaaagcccattgttgccaaatcttattgtgttcaactctgaaatggctgtcttattctcactgtcagtgcttccactcaagcctatttcattgtcacctaggctacaaatggtctctgacttaggatggttcaacttaggatttttcaactttgtgatgctgcaaaagtaaacacatttggtagaaaccatattttggatacttttttcactttcagtacagtattcaataaattacatgaaatatttatgtaatttactttattacatgatttacattaggtgattttccccaactgcaagctaatgtaagtgctctgaacacattcgaggtaggctaggctaagctatgacatttgataggttaggcatattaaatgcattttcaacttatgattagtttattgggacataaccctatcataagctgaggagcatctgaagaaagacagacagacagaaggaaggaaggaaggaaggagggagggagagacagagagagagagatgaaagaaagaaagaaagagagagagagaaagaaaggaaggaaggaaggaaggaaggaaggaaggaaggaaggaaggaaggaaggaaggaaaaagaaagaaaaaagaaagaaagaaaagaaagagaaagaaagaaggaaagaaggaaggaaggaaaggaaggaaggaagggaaggaagggaggcagagaagcaagggaggaaggaagaaagaaagggagaaagagacctcctatattttgggacaactggtgaaatttgaataaagtttggagatcagacttcagatattagatattaccacataggggtaatggggtatgatgtctgcaacttactttcaaatggtttagaaaagtgctcttaataatatgtatatgttaaagaacaagagaatgataaagtaaatgtggcaaaatgttaacaattggtaaattcagatgaagaatatcctaaaactttttgacaattcttgcaacttcctctaaattaaaattatttcaaaaagtttttttaagctaacaaatcttgctgccctggcacacacagagctgatgatggccttcccctgccactccactcctcagatcctctcaccaaagtgtcaatggctccccatgccaacccaaaaagtccaaagagctcatctggcatgcaaaccatactaccatatgctttcacctctgtcattccaatttcatggtgttcttcccaacactatgcactctacaccctccccactgtttgatgtaccatgccccctgaccccaccccagcccccgcccgccgcattattctgcttcaaagcctttgaagaggctacttcctttacctagagtaaaacaacctttttttcctaaagataagcatcagtcacatccttgcctcaaggcctaatttgaatcctattctttccaagtcatcactcagatccacccagttggaatttttttatcttcccaaggcaggtgttgacctctgtgtctggcttactgtctcagtccctttgagctgccatatatatatatatatatatatatatatatatatatatatatataacaaaaaccttagactgggcaatttataaacaacagaaatttattgcttatagttctgagagctgtgaagttcaaaatcaaggcaccagcagattaaatgtctggtgagggctcataccttatagacagcaccttctatgtgtcctcacatgatggaaggggcaaacaggctccctcaagactctttataagggcactaattcattcatggagagagagccctcacaacctaatcacctcccaaaccccctcttaataccaccactttggtgattaggtttcagcatatgaatttgagagggatacaaaaattcagactatagcacttacctccactccttatactggaaatttcattgatgtgtccttcacccaccaaattaggagtttgcagaggctggtaaaaatgtggttttcatctttataacccttgtccctttttaaataatttaaaaaacgtgtgctgccagggctgatcagcagattcaaggcaacaggggaagtcgcagttctggcaatgagcttcactaaacatgcgaagtcattcagacacactttccactctccacagctcccagctctgcaaggaaaggcagagaggagagacatcctccacaggctcaccttacccccaacaatgttcctgtatggagctcctcccctttccagaagccccttcattcagtcaggtcagtttgtcacaccctgcctcagaccttccagcaagctctgtgcagctgctgctggcagcgaaaggatgtgtgtgaagctgctctagctgcaggttagagcttctccaggactctaaatgcttgaatggctttattttcaatactttacctttttttaagaaaaaataaatttaagccttttgaaaaaacttatgtaaaagagtctttttttaactccttagaaagttctagatagaaaacaaaataagggtgctcaaaaggaatagaaattcaattgtttgctttctaggtcttctcccccctaatgttatgctccctaagcaccctgtctttctttcttctagtgcccataggttttgttcaaatcaaggctcagtttcttcttccatctcttccttctactgacagagactaaggctcaagggcaattaagtcacttggccaaggttatgttgccctaaagtggctctaggcttgttagtgggtttatacatcctacaactggagcttaggatcaaacactgagatttggggattgcacatgtagttatagccagaagagccaggtccttcaaggagaataaggagaaaaatataaggccaaggtctggacattgggaaacctgcacttaggggacacaggaagtcatcctatgacgaaaatggctttccattaaactccaagagattacttcctaaacctcattctataataaggaaaacaaaatataccactcttgagtaagatctaaatacaagaaccattctttttcctttcattcatttagcaagtattgattaatgtctattatatactagaaatgtttctatgttctaaggagacagtagtgtacaaaacagactaagttcctgtttgcagagaatttaccagagctaatcttgtaatatctgaaaaatcagagacttcctaaaacaagctatttattctctatgaacttcacttctctcatctgttaaatgaaaaaaaaaaaaaaaaaaagacaattaccacccgcatcacatagcgttgcagggaaagctgagtgaaatgtcatatagaaggtgcctaacatagagtgacattcagtagataatcaataaggggtaataactaaatctgattacatacttaccagagttatccttcactatccctcaggactcaatctaacaaataatcctgtcagcatgttctaaatccaatcattcagatataaccctagagatttttgctatttctgcattcaagtctgcactacactcaatactttttcctcattccaagtaataactgtaaaatcatagttttcacatgcaagttttatatatttctaatccacattaaaatcatcagtaactattaaaatttaaaagttcatgcatgtgacatagcacctaaaagtaactgagatgtcaccggaagtctgttgggtctactttgggagatacttctccacaggctcgacttggcagaactgatcacagtatctaaatttggcttctttaaatgaaacacattttggagagctccacagtctgccatcctctcacaatctccactgttactctcctaacacagcccctgccatgactgtcatagcctcccaacttccacccttgctccctatagcctgtgccccacgcagcagccagaatcagaccatgtctctcccctgccccaaatccaccaatggattgccatggcacttagaaagaatgtaacgagcttactgttgtctacaaaggccttgcgtgatctggtcccttgttgtctcccccacctcatttcctacccttctttccattggaagtacagctgctgcagcaccaaacgtcattcagacagccttgcatccactaatgcccctgcgtgcagcacactttgcccagattgtcatggctcactccctcacttcagaagccttccctcaacactaatcaaaaaaagcacctccgccatcattccctttctgctcaccttgctttattttctcaataacccttatcacggccaagcattaaattatgtattcacacatttgtttaatgtctgtcaatccccattagattataaactctaggatggcctccattttgtctacttttacactagtatattactaatgcctgaaatagtatggaagtcactcaacaaatatatatttgttggttgaaggtatgtgtgactgggcaaagtggataaccagtattctttaaaatacgtccagtttgaagttcctctatgacatgtagaataggcaggaagaaatgcaaacctggagttaaggagagaggaaatcaaacagcaagaacatatgaaagcatgatcaaaaccccacggactcacccagcaaatgctatagtaatagcggctccaaaatacagaaattgattagaggcagaatagagctcagggatagatatgaataaaactgaaaaagaaccaacttcattattcaacagtttgtggcttaaactcaatttgctttaaaaaggaggagttaggggagaagtgtgtaagtaaataagcaaaattttaattttagcctgtaataacaacttactccctgaccaagctttaaaaacagtgctgaaaagtaaccaggtaagttgagatttttctgtttgtttggtttgattttacacagtatgtaaaagttaaatttccaaaagggaggctgttaagatggaggaaaaaaggtgaaatgacttctggtagactgagtgtattaatggcccaactcatggccttcctatgtatgcacactttgactcataactttacaatcctccactcggactcggagttccaccacaaactgctttggccagtggggtgttagcaaatgtgacacacaaagagacttgaaaagtgcatgtgtgttgccaactaccattttacacaactggacttgcccatgcttcgaccccagacaccactgtgaaaacatccctgagctagcctgttggagggatatgagagacatgggaaggagcattgactttaccaaggaaggtcatcttggcttgccagctaactcctaatgcatgagtaaggcttgctaaaataatcagaatctgcttagataaccagaactccccagccaactggtagactcatgaaaatcttccatgattatccttttaatcatttatccatttaatccaaaactatgttttggaactgtttgttacacaacaatagctaactgatacaacttggataattccctccaaataacaaaggagattaaaagaggaggttgaaggagtcccttaaattcaaattcaaggtcataattctaaaatattttatctaaagcatttaaaaaacaaattcagcaaaagaattctggattttctggttaaatctttttaaaacatttgaaaacaagtttatgagaaaatacatttaatgtaattgcaatccaaagctgaaccgttagcatccccttaaattataaaaatggggtgattttttttacaagtataaataacttacactgagtaagctgtctggttttctttatggcctccaagaaaaacaaaatggagccacgtacgttcacttcatccttcagtaattctcctctagcctcatcacaggggacttctcatttccgtagcactagagtctattttcattaaaagaaactattccttccttcatctttaaaacattaactaccttcttgtatatataccagattcacttaaagaactacagctaaaagaaaccagcaactatttgcttctattcatgcttttgtattggcataagcactacctcttttcccctccaaggttatcttttcttttttctttgcatatttcccaggagctctgcactaaagcataaactttcacattagagaagtgaataataaagcagacaccagaggaatacatatgctgtttgaagaggctttctcacccagcctccttcatgcttgcagactcatacccagtgcagttgacaattttagttcactcagaatccattgtatattcttttccataaacatacacatctttgtatgaggagaaagtgaaccaaatcgagaacattattaaagacacaggtaataatatgcgctgtagagccttctagtatgctgagtctcatttggtcctccttttgtggcaagcatagcctggattcccacctctgttttacaggcaaggaaactgaggctggcggtggcaatgtaacttgatgtttctcctttataaagtgactaagtcaggattcaaacccaagttcaagatccttttctgtacactatgcttctgaatcttacagcgttggggaggggggaagttttcatgtaaaagaaaaggacaacagacatatttacatttactttgaataattgcatgaaaaaaggagctaccaactggtagtatctctagaacaacattctacagcacacaacagaaagctatataattttgcatcatgttatgtactgatcacactagagcaacaaatactaaaatgaagattcccaaacaacttggcttgacaatcacagcttcaccacctcttaatattcacaatgtgctactgagggctgtttgttctttatccaacatagcctactgcaataaattcttgtttctccaaaatacatttaagggatgtggtgctgcaaataattgaataggcaggttagtggagactactaaatgtagtaacatctcatttatttctgtctctgtccaattttaaagctctagaacagagtttggtaaactcttttgtaaaaggtcagatattaaatactttaggctatacagaccatatggtctctgcgggaaccactcaattctgcccttacagtgtgtgaaagcagcagtagatgacatataaacaaatgagcatggctgtgttacaataaaactttatttacaaaaaacagatttggcctacaggaagtagtagtttgccaacccttgctctaaaacataaccctcacccagaaggaaaaaatgcagtcacgtcttatttactctcaggggagaactgacaccctgagtgacacctattctctcattttatacataggttttagaaactaggctattttcttgcttacagcctatagcaaaataggagcaggaattttaaagcaagggtactagtataggcagtagactgaagtccaaacccttagaacatcgccagagggctgatgcagtagagcagtctgggccagttagtgcaggggcaaacactcttcctaaatcccttcatgtcctcttaattatctcagtatcacctcaatcagtatcaccaaaggaagattccatttaatctctctaaaacagaagaaacaaagatacagggatccttttgtaaagacccatgaaaactggctatatctagaagttttgaaactgactgaataaacttcagctatctagaaaatatattttgtgaaataatcagttccccaaataataataagatgacaaacatttataaagcactatgagatatgcatcattcgaagcaattttgaaattaatatacgtaaaatgtaaagcattttacgtatattaatttacttaatctctacaacaacccaaccagataggtactattgttatcccattttccagataattaaatggaggtacatgaagattaattagtttgtccagagtaactcaggtactaagtggcagagctgggatctgaacccaggcagtctggctccagagaccacagagttatgggttgatgcaaaagtaattgcagttcttgccattttcatgacaaaaaccacaattacttttgcaccaaccttttgcaccaataattgctacactatgctgaggcattactttatacctatatgtggactgccttagttcaaagactagaaatataatacatatacttaaaatatctattaaatagaatataatcttcagaatcttaaaactgagacatatcagtgttttcagtgcctcagggtgaagaatgcaagtgcctattattattgttcagtttcaccaaaataaaaagattgctaggatgtcagattgaggatattttactcttttggtgttgtattttaaattgcttttggaatgagctagggaaataaacaacaagtaaatggagttatgggaaaattctttttaggcattcctagtctaatcagataaatatgagaatgtgacatgagttcgtgcttctattttttaggtcaggatatgaagattaaaacagtttctatttgttgtctttatttcttaagtagcttgattgtaaatttggtttataggaggaaaataatttggttgttaaaatagctgagtttattattggcttaacacccaacaaaaatattttaacctactatatccaagataaaggactaaaattggtttgacaggcttatgacttttattgaaactgatgttttattaacagaaaattaacagatttggagagattttttaaatagaataatctgaaaaaaaattgtttactgagaggtaactgtgtttttttttatttgtgatataaatacttttgttgatccctagaagttcagagtggagaaaaatcttctagcttctgaaaaacagaaactataaaccaagcttatgttagatgcaccatttgctcaactccatgcaagaaaaatttctccaaaacctacctgtacacttactttatagcagttttccccaataagaagttagcatttactgcaaagtttataaaatacccaaggaactatggagaatgaatgaattttgattagccatttcatcttccttgacaattgttcattttctccccacctttttataaaactacaaagcaagggattcaaatacctgacatagaagaggatgggtgaggtaaagagagaaaaatatcccaggactactttttcactataagacataagtattaaatcatagcaatctctataatcacaatgttcagtgatattttaatagccttggaaattttttaacatatggatcaagaatttaaaagtaaaatcattttcctaatttcttccagatggtaaatattataatttttttcattaccttattggttacaaggcatagattctacatagacatactgaagaacagtaaggaaagaaaagagaaaagaaaaaaaggtatggcagaaatagcttagtggatcattgttgtggactgaatgttcatatcgtcccaaaattcatatgctgagatctaattcccaatgtgttggtgcttggagatggtatctttggaagataattaggtcatgagagtggagccatcaggaatggggttcgtgcctttacaaaaagaagccagagagctagctcaccctctttctgccatgtgaagataataggagaagtcagccacttgcaacccaaaagacagccctcaccagaacctgaccaggctggcacactaatctcagaattctagcctccagaactgtaaaaaaaaaataaatttctgttgtttataagacacccagttgatgatactttgttacagcagcctgaactaagacaatcaccaaaccaactttttattcttcccagacacaaataggactatagccccagcttccctttcactatatggggccatgtgaccaagctctggccaatagaaggtgagcagacttctatgagttttctcctttgccaaagcacagacaccaggaagctggtcgtgacaacaaggtgataagagtggagtcacaagaacactgcttgaatgaatgagaagaatctgcccatcaagaatactcactttaggctttgattgagtgagaaataaacttctcagttaagtcaacaagatttcagattttatatgttatggcagttaacatcaccaaaactaacatgtagaatctaataaggatatctaaagctctggaaatgtatttcctggaatggtacaactttattcctttcttgttgattttagattttataacataattgtatatctcagatgttattaccatatcttccattaaatatcatgtttgtagataattgtcctagctgcaaaatatatagatgcttataaattttgttttagcaattttaagtagcaatatatattgtcagtacatcctaaactgaaagggcagagatctggattctagttccaggtactctaggttcctgtcacagttctactgtatatgaaacttaaacctggtaacatcttggttccaccatttatttgtcaaatatggtaactgaattaaataaggctggagactctaaaaagtaaaattttataagaaaatttttatgtttcttttctgggggtgggtgggggacagagtttcactctgttgcctgcccaggctggaatgcagtgatataatcatgactcaactgcagcatggaactgacaggcttaagtgatcctcccacctcagcatcccaagtagctgggaccacagatgtgagccaccacacccagccaagaaaattaatatatttctacccagtactttttgcatatactacagattggtcattccttcattattaacatagaaaatattttgaggagaaaagtagcaacctcataataaccctttttctttgagaattatcctaaaagttctgccaacatgaaataaatgtctagtaggttataagctccttgaggaaaccatgtattgttcatctttgtgtttctagcacctaactcctgatttttgctgaataaataaattcctattgagaagttaaaaaaaaacattatttcactatagttttaaattactgaagaagtgttcttatccaatcaccaaaggcacaaaaaagtcaggtcaatggccctagatccagttttcaaatactactacaaatgaaattgtttcattcctagaaagttctctcatgaatttctgggtgagctgtgtgagataaaagtggagataatccactccattttaatacgttttacttattgtgattcctctataatttcttctatcttttaaaaagggttcaacaggtgaaatggggaactgctttagcataaccaatattgctgttaggaaatcatcaaactataacagcagtgagctgaaaccactgaaatgtaggatgcagctatggacattattccaaaaagcataatgattttctgaagcagaaccacctaaaaatttgggattcaaaactgctaattgatctttcaaatcattcagaaggtcattttgaccattcattgcatccctgagatgaaaagactactaggaataagcatcacctcaaaacctacataattatttccttagcaaaatttaataatgagagtcaagacaggaattaaaaaaaaaaaaaaaacccaagaacatctgtcagtctaaatttcctaacccactttttcctgtgaggaaaatatgtcctctaaaacttcgtcattggcagctccaaatgtaggctgtgaaggaatgcttatctaactattggcttagtgctgtatctaagtggaaagaaagcttaaccaacaggaacattcatcctgtttgagggaagcaaacatagcttagaaagttagtcaatccaatcaataagaaatatatctgatactttccattttaaaaattgaaaatttgcaaagaatttttattaatatactgataattgttgcaatatgtaatatttatacgactatggcacatggaagtttactaaatatgttttcacatacaatgccacattcgtttatcacagtaaacctatcggtatttttaatactcaagtaatagatggatcagcattgaagctccaatgggagcttcaatgggagcttaaacaaatgtaaggtccaaaagccttcataacattaggatcaaacagtgaagattttctttgcttcaaaagttttgtccattactgggaatatgttttagaagtaaagagtcctaaccctagcgtgatgagctacagtcataataatagtgtacatgtacagcacattacaaattacacattacaatgttcttttgacaagcactttctcattgtgatgtggatattcaccaatctagtaaaataccagaacatatatcattattttcattttaaagacatagagactgaggcttagaaaacgtttcatggcctgagcgtggtcccgttgactctaagattaattcaccaaaatgttctgcttcttgaaatcagatattagaggaacacagttatagttaagttggaatcactgattgtcttgaaattaaatgaaagctcctcttctaccagtgtctagctccacaaaaggagggacttaaagaaatgtagggcatttaactccttggtggtgtgctttttctgtgggaagagggacatttgtttcattcgttttgttctgcttttttaaaaacatgctcaaggtagacagcaactcttttgaaaacacaaagtaagaattattaaattcttgggcaagctgaagaaatcaaatcagtcctatatataacacaggaaaaacgttggagggaagagcaaatttttccaaaaacaaaattcaccaaaaaaaaaaaaacccactggaaaatgtaattcaatcaaaaaattatattttcttcaatttggatttatgtctttgcttcagtaggtagtgttaatagtctccaaatgccagtgtgtattcatgaacacttagcaagttcatgatgtgatacattcctttttggatacatctttcgtcaaatccatctgtctatggcagatatgcatagttttacagaaccttatctgcaaaagaacttccacagttagacaaaaatggttttagaaaattgagaggagtggatagaagaaagatcaactattgctgtttgggagattttttttgctttccccaccatgccttgcccccagcccactgtccactgggcacctggcacctctagactccatttcttaaagctctgttctttcacaagtaagagatatgactctggcatctcaggaagaactgaagtgatggaagtcccagaggaaagtaccgatgcaagacgtaaatactcctagtatacacccaccagaatttccttgagccttggttttaaacatcctctgaattatataggcagctgattaatgtttgataattaagcatttttatgtgattcatctcaataagagcccaagcaaggtaatgtaaacaatgaaggcataaaaaggtggaaggagatgtgaatactacaccaagtgggccacatggacctaaggaaaaagaggagctgagttgaagtcaggagctgattcagataaagcagcttcaactctactacttcttactcttagatgggctccagaccaccttgagggatgggattatatttattttatagatgcactcctttctcccactaatacagtcagttaggaatgtatagctaagaatgagccaaccattactattcgtgtctatggctacagaaactcaataaatcaactcactattctgggtcaataaatgaactcattatactgtttcttcatgaagtaaatgtgtttctaaaggaatgtattaaaattacatttttaaaaatctatgtattttgcatatatttgattgatacagaaaaggagtctacgttggctacttttctttctttctacaaacttcattcattggtgtgatctgaaaggggataatatttcagaaagcaaaaatatttttaacaacaaaactttgtatttccagtgtgatctaaacacaaaattatgcaaaacacaactaatatttctctcctactggctaaatcatgccagttgtttaggtgcaatcaaaaataagccactaatgttatttttataggaattggcaagtaattgccaactatagctattaaaagtttatatttgccacaggagcctgtgattttaaatactgttcaaatgatttatgcttgagagttatacatagcacaaatacatacatttgtatctacaggtctaaagaggaaaaattagacaaaaagcaacttgaaaaggaacccctttatttttaatgacctacctttgtgctgtattgagaaaaagtataaaaattatttgggaggaagaaaaatatttctaagcactaatttcataggcaaaagccctattattttttatgataggctaggggaaatcaataatgatttaaaagcaaacagtaaactgctcacatttaccagtctatactcagtattaattctaccctgcagtgtatgctatagaaggtaatgaaatgctgatgttttctggttttccacttcaatctgctccagctttatcctaaaccttgtcagcaacagaagttaccccccagcaatcatacaaacctaataacggcttccctggcttaatttgatctgctccaatcacaaattccaatccacatactttcttctgttatggttgtgtctgtatgtgtttaatgtactttttataaggcttttttacaacaagcgcatggtttttcattcagccctctaccacataaacagaaccactgaagagcatttttgttcatataaaaatgttttagttattcatagtgtatgtcttcaattggctgcagattacagtgaacaaaagtattgctgccatcattttacatttctcctgttactgtgccctatctgctgtgtacccctgtccccaaagcatttattataatatttgctgcttgctctcagttttggactgagatgcttgggggtgggaaaacttaaaacttgcctgactcaagtgctctctaagctttgatcccagcatcctgctttaacctgctcctgttggacctctgccactttactgaccccataaaacaaacagagctagcaaatgcatcaaacagcctccttcaaaatgcagcttgactgtgattcatggcacaaagctggaataaccctgccagttcttagaagctttaagattcatcgtcttgaacttgatacacatagtatagcaccttaaaaacgaatcatctgctagttcagtattttctacttacaatcactccctcccagggcatgtaattaatttactgagcttaaaaaaaaaatatcaggattactcacacagtcttgaagatgcaatgtcagctatttaggacagaaacatccaaggccgtgtcagaactcaattacgactacatatgcattaaggcaggaactggcaggcctcagggtacgccaactataggactcgtgcttctcgtacgctgggctataatctatgaaactgagctccagagccagccaatcacttagctcctcataacaagtctaactggctctggaaagctgaaagggctgcactggaacaacacagatgagatattctacacattaatctacttatctggaatcactttgcctctaaaggccagagaaaaatcacagcttccttgtcggaggggaaaaggacaggtgatctggggaaaacgcagctacacctggagcaaggtctcttcccggcttggcaatctcagctgtgccggcgctacgggacccgagccgtcccagaaaccaaagggcaggcacggcagcaaacgcctgaggtaattttcatctttctttttatttttagtagaataatgcagactgaaagtgataagcataaagtcgctgaggcaactagatatgcttcgattttattttacattttcctattctaatcgtgtgcaggatcatttgttatgaagtctgaggagggggagaattaatgtacctgaaataaacttgaaactaaaacgatcatttgtggaggaaaatacaggattttccagaacagtttcagagctacctttgcagatgggtaggcttttcacccacccacagaaagaagagtcaacggggctgagacaggacagggatgggtttcaggagcacaattaaaagtttttcgtatcttaaagaaaatatctatgttcagagagaaaattgagaagataagttactgcccagttcctctggtctttgacacttagaccacataagaatgttccatggtagaagggttgggacagagaatcttaggaatcctaagagagaatcaatactgctcccctaccccaggtttttcttgttttctttacaatagtatccttatttcccattacattttagtgttagtcataccaattacttgttacaccatacttctacatttgcagttattaaaggatctgcagaaaacattttaaagtcaaaatgattatagaggcaactaaaataagaaagcaaaaaaatatgtgaaactgacatacacataaccagaacaccacaccccttagatacttaatgtacttaacccaatgacaaatccttccaaatccttagcaaattgtctgtttctttaatacattttgtagcaagtgtaacattagcaacgaagaaaaactttggcaataaacttgtacataactaaatcaatccttatgctttcatagtgacgatagaatatacataatattttatttgttttgttggacttataaaatcctaaggcaagaagctgagaagaaaattttgctttatttagtggtgacatataaacagtaacagaagagacatttatgcactttttttggctgtagataattgactgaattcaacttgagatttgacaccagaaagaaaaacgttgcaatagacagaaaacagaaaaagtaatccattggcaatttccccccagggtttgttctttgaattgtccaatctgtgactagccagg

SEQ ID NO: 462 - DNA, 48318 bp, Homo sapiens
  source 1..48318: mol_type = genomic DNA
ttctgggactgaatgcaaagcaggcgaccctccccccggccccaaacccaagcactgcagcggccccacaacccctccccccacccacatccccactcccccgtccccagtgagaattcactatttttaggaaaaaggggaagcctctcagcagatccttgaaaggaagtgactttgtgactaagtggaggcaggaacatcatggcacaagggcacacgtcgcacacccagctgggcccactgtggacggcgcagatgctgcctcagagcagcctccgagacaggcagctgcagcggtgcagcccagggccctcgcagaagcttccccggggcctggcctcgtgctgagagaactctgcgctcctgagggcacctggctgtcatgcacacgtgctcacacgaacacacacacctacacgtgcgcacactcacactccgtgcacacacgtatgtgcacactcatgcacgcgtgcacacacgtctaccagctgagtgcagtaaaagaaccacatgaaaaccttgcatcctggttaaaagtatggtgacaacatggacagataaactggaaaagatgggaagaaaccttaagcccaggatctggcagcacaaaggtgcctggaaagcgacaatcagcgtttttatattcagggaaatcaggaacactgccacccgcccgccaggccggcgcccatgccagacccagccaaggtgcttctggccacatcacccctgctggcctgcagggagctggcccaggagccgagaggcctatgggagcaggcaaggcttgctgaggtgacagcggagaggagaggtcgggctttgttgccaggcagccccccaacattcaggtcctttttccactgaaagccatgtggcctcagagcggcgtcaccccgaagcttgtcccagccggggcctgacagcaggtaaaggctgactagcaactctgcatccctcagagtgtgggggaaggtggatgtggtcccacctccacatccagggtccccttgctggcctctgggcatttgggtcctggtgtgattacccagccccctctccctgcacaggggtgaactgcatctcctggaggcagggccagtgccccaccacctccccagcacacccgagcccaggtctgggctcccaggagggcctggggccacctgtgggaccaacccaaaccctcaggcagctccaccagcagaaagcgtcatgctgtgtgtgggataacctcctcaggggattagttctcagggcctggtccgctagaagccaaatgcctgtgcccagccacccgtgacgcctgcaacaggcaggagatcccccaacagttactcccagccttcattccacagggtctggttttcctggaaggtgggaagtcccagggtctgaggagagggagcgcaggcccccatttgtaggagtgagtcagctgacccgcccccggggttcctaatctcactaagaaagactttgctgatgacagggtttcctgggagtccatgcgtgcctggagcagcagcgtctccagggacaggcagccaccatgagcctcagtgaggagcaggcccggagctttctggaccagaaccccgattttgcccgccagtactttgggaagaaactgagccctgagaatgtggccgcggcctgcgaggacgggtgcccgccggactgcgacagcctccgggacctctgccaggtggaggagagcacggcgctgctggagctggtgcaggatatgcaggagagcatcaacatggagcgcgtggtcttcaaggtcctgcggcgcctctgcaccctcctgcaggccgaccgctgcagcctcttcatgtaccgccagcgcaacggcgtggccgagctggccaccaggcttttcagcgtgcagccggacagcgtcctggaggactgcctggtgccccccgactccgagatcgtcttcccactggacatcggggtcgtgggccacgtggctcagaccaaaaagatggtgaacgtcgaggacgtggccgaggtgggtctgtgcggagcctcagggaggcggctgtgtgcatctcttgcacctgtcccaggtgtctaagggtcagctcggatcctcaggcctccagggaggcctcttgtcagggcacaggctagttctgtgctgaggagcaagtacctagagccccctcccggcactgtgccctggccgcctgcctctccgactcggcttctggctcaagctgacatcgcatggccactgagttggttagacctgagtctaggagcctcggctgaagcagactcaggctcaaaccggggtgcccctgattctgcatccacatcccatggtggggaccatgtagtccctgtgaggacccctggcttccaggaagactgaccagatgggggcttcagggctctctgggctgggagggaggccctgccttgggatttgggaagaagaggtcacagtcgaaggtggtgcagacgcccacagggagggagagccaggggaaccccaaacttccactgtggcagaagcagctttatcccatgggagcccacgccagccgccaggggagaacaaacctggtagccactgagcacaggggtccagggtgggactggggagggacaagagacagaatcgagacaggctcactggagtcactgaaggagggaagggcagggcctgttcatgcaaagcctgggctagggcagacgcttcccgaggacagaggcggtcctggcgggactggagaacaagaggggtgtgaggtgcctgccagactgggtgagggcagcggccagcagagacctggaaaggccctgaggagctgcccggcaagggggctctgaggaagaaggggaggggggaagccccttctccctgtcctgcacccgtcccagcttcctctccccttttctgtccccacagctaaggaggctgcaagaggcccaggcagcctccgctcttgctggatgagccttgggaattacccaccaggctgccagcccaggggcaggtgtggtccctccttcccaggcagctggggagtggcaatcctggtttgttttcgtttgtgggttttttttttttttgagacagagtcttgctctgtcaccaggctggagtacagtggcatgatgtcagctcactgcaacctccgtctcccacgttcaagcgattctcctgccttggcctcctgagtagctaggactagaggtgcccgccaccacacccggctaatttttgtatttttaatagagacagagtttcgtcatgttggtcaggctgttctcgaactcctgacctcaggtgatcaacctgcctcagatttccaaagtgctgggataacaggcgtgagccaccgcaccaggccggaagtggcaatcctcttatcccaatggcagtaagcaagcagcaaggcagtgacctagattcagtaatccccgggttaccttcatctccacctccctcctaagaagtggggcacccacaaatcaatcgtgcatcaggagcatgagttaccaggaagccaggaaacttcacagcagtggggcctggggtggacaccagctgctcctccctccccccgttccctcctccctcctcccctcactctcctgccaccctcctccctccttttctgccatcctccccgtctcccttccttcctcctgcacacaatccccaagacaacttctcatccccaccctgtcccaaatctgggctgtgtctttcttgcccccaggagtttgtcccccgctgccaccaccccttcacccctttgtccccacccggctgatggtgtctcttccctgctctgcgggtccccctcaaactgctgggctgtcctaggtccgtccctcggcctggcctgttccccagggctgttctaggtcctgccacccccacccccagtgccatggccgcacctgccccaggactgacctccgaggcctctcccctgcccagtgtagctggtgccattccaaggggctgggcatggtgtctgtccctccattctgtggagtcttagttatctcagactaagggaacagaaacttgagtctgaattgccaccaaaaaaagcaaatcttcatgaagtgcaaatcctcatgaagtgcaaagcctcatgaagtgcatctcagcaccctaagcactgccaagtggcttctgggttcatgtctcagtttacagaaggggggactgaggcagagcacacctcagtctggcccactgcaccctctttggagggcgtgagccgcaccggccagttcaggagagcagctcgtggctgtggtggaagagtccctcagacggggcgtgggtggccagcacgcaacacccgggccacccggagtctcaccctcctgcccgggccacccggagtctcgccctcctgagccttgtctccctgtttacattggggaactaatgtctgcctctcaagggtgctgcagcggctaaaccagcctgctcctgagcacagcgggccctgagtctgcagggcaggcaggccccgggtaacccgctcctccctgagctgcaagcgtccatcctcctggagctgagggtgccagcccagggtgaaggctgcagtagcctggcctgtgggccctcctgtccccaggggtctgtcccaggagccaccatggagggaggggctgcccagggctcacactctcgggcctacagggagcccaggcggtgccaggccacgtgggaccagcttctgggaggtgcagggcttcagctgatggctccaagtccctgtctgctcccagaaccccacgactacacatgttgtgtgtcacggcagccccttggggagacacagcgaatcccagggcctgcacaaggggggccctgccgggactcaggactgagcacaaccttcctggagcctggcccaggcctgggcatggattgtgaaccctaaaaccttgggctcaggaaccacaggtcccagaaggcggacaccaggcccccctccatccctcccaacatgtcagaagccaatgggccagccgggtgagaggccctgcccagctacccagtgttcatggctcctagacaagcctcttggcaggaaggaagcacaggtcgggtgcagagagggaggagcgagtgggcctgtgaggtggcatggccttccccatcccccgctgtgcaccccgggcagggacgccgcccacacctgatgagggggaagccaccagcccccccatcacccctttgtggctcctcagacctgcaagagttcacagcgagggcagctgggatggacgatcctggtgggctggtggggctcggccacggccaccaagtggcggggcaggactcacaccccagctctgactgtgcagcggtttctgagcccagccccagccgaacagccacggaccccgcagtgctgtgcatgcagcctcagcctccaccaccttccagctcctctccctgggaccgtcatgggaacccatcccaaaggcccgtcccgggaccctggtgggtcccctgccccctgccccaaaacacctcatcacggggtcctgcacgtcgccagcagtcaagacccttcgactcagtcctatggtggtctctacaaggctggacagagcaggggcgttgagaacacgggctgggtgggaatccggagatagagggaggagggtggcaggaccggccgtcagccatgctgagcacagacggcagaggaggtgtggggcttgggcagttggaggtgctttggagaagccacagtgggtgtgaaggccccagagcgaggcccagctgctcggctatgtgagcacacacagcccccaggcctgctagaggcagagcaaatgcagggggttcccaggagcctgagagtccacagctgccacctgctcccagacaaggctcctggcatgtctgaccaggagcctctggggaagtagggaagcccagactggacagtggagaggaagagaccagcaggcaaggaccccccggccaggcatcactacaggggacacagaacccagagggcaccagagaggagagacggggggccagcaggggccacgtgttaatcttcaccgacagacacacgatggtgtggctgcatttcacaatgggtggggcagctggcagtcggacagggaggccgagggatccatccctgtggccgaggggagtttgcagggctgtcatctcaggaagtgaaggctgggctggggtcgggctgctgggccacgaggggcagcgggagggagccgctgaggctggaagctgcaccagccaggctgggaccagggtggctgtggcccggctggtaccgagtgcccatccatgcaagggcagcagagtgaccagacgctggggaaaggagagcaggtgtcagtgagagagtggccggatgtttccgcgtgggactctttgcagtctcgatggcagacttacaaaaaagtaaacattccctgtggtgttagggaagctgaggagggcagagggcagagtgcaagccagggtttggagcagatgttcctggggagcccctgggctgggccagctgctcgcagaagcctgacaaggtacagggaaggaggaacgaggggcaacctcactcaaaaccagctgctcagaggagcatagcttctggcagaacctccgcggtggccaagccccaattccggctgcctgctctggacctctaaggagctgttcctctcggtcctaagggtgtgggggctggtgagacacaaagaggctgcagtcacaaagcctcagcgtgaaggtctcagtgctgggaccaagggtgtatctggcacaggcctggaaggaccagggagtgaatggggccagtggtgaaggagagaagctgtcggcataaggatggtaacggcagcccacctcagctgggacagctgaaatggagccaggtgcctgctgagaccagtgacgcagccaggaaggcaggggacccaggagcagctgtgaaggagaaaagacggcagacgaacgggctgagagagcattttacagagtcctgagtgcgcttaaatcccaggatggggagagactatgaagaagagaaggtgacaaatagggtgaggttcttgggtggagggtaggccacaagagagaggcaggaaggctctgtggctgttcccatactttctttgtgaaacaagagctgtgaaaacgtgtggggcagagagaagtgacagagtcaggtctgagatccaggaagaaactggtagagacaaagctggcaagagaagtgaggctgaacattgatcaaccatagcctgtgtgactatggggcaccatctgagggtcactttgtgtggatctgtgtggctccatctaagagtcacattgtgtggatcctgtggcactgtctgagggttacattgtgtggatccctgtggcgctgtctgaaggtcatgttatgtggatctgtgtgacaccgtctgagggttacattgtgtggatccttgtggcactgtctgagggttatgttgcgtggatctgtgtggcaccatctgagggtcacattgtatggatttgtgtttgggaccatctaagggtcatgaggatcacgttgcgtggatccatgtggctccatctgagggtcacgttgtgtggatttatgtgtgggaccatcaaagggtcatgagggtcacattgtgtgggtccatgtggcaccatctgagggtcacattgtggggatttgtgtgtgggaccatcaaagggtcatgagggtcacgttgtgtgggtccatgtggcaccatctgagggtcacgttgtgtggatctgtgtgacaccatctgctatctcagggtcacattgcatggattcatgtgtcaccatctgagggtcatcctgtgtggaactgtgtggcaccatctgctatctcagggtcacattgcatggattcatgtggcaccatctgagggtcatgttgtgtggatctgcatggcaccatctgaggtcatcctgtgtggatctatgtgacaccatctgctatctcagggtcacattgcatggattcatgtggcaccatctgagggtcatgttgtgctctttccagaatctctggtatatgtccaggtgtcacgctgtgatctgtgtggcaccatctgagtgtcacgttatgtgaatccatgtggtatcagctgagagtcatgctgtgtggatccgtgtggcactgtctgggggtcacgttgtgtggatttgtgtgtggcaccatctaagggtcatcttgtgtgatgccatctgaggatcacatgtggatccatgaggcaccgtctgaggatcatgttgtgtggatccatgtggtgccgtctgagggttatgagggtcacattgtggggatctgtgtggtgccatctcagggtcacgttgtgtggatctgcgtggcagcatctctggatcacgttttgtggatccatgtggcaccatctctggatcatgttgtgtggatctgcatggtgccgtctgggggtcacatggtggggatctgtgtggtgctgtctcagggtcacgttgtgtggatccgtgtggcaccatctctggatcacctgtggatctgcgtggtgctgtctgggggtcacattgtggggatctgtgtggtgctgtctcagggtcacgttgtgtgggtccgtgtggcaccatctctggatcacgttgtgtggatccatgtggcaccatctctggatcacgttgtgtggatctgcatggtgccgagggtcacattgtgtggatctgtgtggtgccgtctgagggtcatgttgtgctctttccataatcactggtatatgtccaggtgtcatgctgtgaagatcagcaaccagggaaggaccccaggtgagggtgtcagtgaggttggcaagggatgggtaaaaggatgggctccaggtagaaagggagggaaacagtaacagagactctgaattcatcagggagcacacatggtggccactgtagcactgacggctggtggaggagacactgtccaaactgccacaggcacaacaggcaccacgacaagcaggcaggagtgtgctgtgcttggcctcaggggacacaggtgcagagatgagccctcgggggacgcaggtgcagagatgagccctcaggggttgcaggtggtgagatgagccctccctcagggcccatccctgtttcagatccaataaagggatgctggctccactgcccacgctgccacccctgccagggctcactcacccgtcttcctgctccaccatcttttaaatgctggttttccttcaatgccagcccacatggctatgggcagcagctgtatctccaagaatcaggaaatgaggagcaggaagggtgggtgccatttaggagcacgctagcacctcggccagcccccagcaggcttcctctgacctctcaaccttgctgcaggggaagggggtggaggggagttgcgaggagtctgccctctgctgctgcagggccaccgtccctagaaacagcaggagatgtgaggcgcatcccaggagctcccattcagctggcgcagtggctgagggcagagcctgttatttttgccccattgactggtgaggagaaggccacagaaccaccctgtgcccactgcaggtcgcacaggtgggaagtcctgaccccagcagggctgactccggagccgtccacctgggtcactgccccagggcaccctggcctcatgtaaacaaatgtcagaaccaggaagtaagaggagggtctggggtcacatccaactctctgaaggacagaatcccagtcaccggggggtgtctggtctcagtaaccctcgctgtgtctgagctgaggcagagctcagctgacctgttccttgaggggccggaacctaagagccaagagaggaggggctgctctaaatctggtgggagtgagggtaggagtgagggtgggtgggtaccccctgggagccagaggcaggcaaagttctcatcacggtgggccccagaccccagggggcagacccctgggagtgtgtgcctgggaggccagaggggtggaggacagaccccaggagtgaaaggactcccaccccggcctgccagctgcacctgccctggttaaagtgtccgacgaacaagcccccaattagaatgggcccatcccacaccctaccaatggctgtctctcagggaagagtgtaggagtgtcctgcagggggctgaaggcaggagagggtggcgggcaccaggaggcttcagggacaaggcgagcaggcaggctcaacaggcatccaggaagcccgacgtggccggagggcggcaggtgcgtgaggtgccaggcagggcggggccccccatgaggcctgtccaagtctgctggactgagcactggggggcaccagcatcctccgcacaggggtgcatggagccaggctggagccacagggacaggcccagctttcaccgcccggtggccacatcccagtgcccagcagggcccctgggcacctcacacctggagggcagcagcccccacagagcttgacgacaaccccagtggtgcgggctccaggcccacggtgcgacagcctctttagcctctttcctctcttgcggcagtgccctcacttcagctcatttgctgacgagctcactgactacaagacaaagaatatgctggccacacccatcatgaatggcaaagacgtcgtggcggtgatcatggcagtgaacaagctcaacggcccattcttcaccagcgaagacgaagatgtgagtgtggggggcacctgggcagccgcgcgtctgcctccctgcctgcctgcccgcccgcctgttctgtgctgcgcatccacctctttacctgcctgcccgcctgcccgtgtgttctctgctgcgtgtctgcctccttacctgcctgcccgcgtgttctgtgctgcgtgtctgcctccttacctgcctgcccgcgtgttctgtgctgcgcgtccacctccttacctgcctgcccgcctgcccgtgtgttctctgctgcgtgtctgcctccttacctgcctgcccgcgtgttctgtgctgcgtgtctgcctccttacctgcctgcccgcgtgttctgtgctgcgcgtccacctccttacctgcctgcccgcctgcccgcgtgttctgtgctgcgtgtccacctccttacctgcctgcccgcctgcctgcgtgttctgtgctgcgcgtctgcctccctgcctgcctccctgcccgcctgcccgcgtgttctgtgctgtgcgtccacctccttacctgcctgcctgcctgcccgcgtgttctgtgccacgcgtctgcctccctgcctgcctgcccgtgtgttctgtgctgtgcgtccacctccttacctgcctgcctgcctgcctgcgtgttctgtgccacgcgtctgcctccctgcctgcctgcccgtgtgttctgtgctgtgcgtccacctccttacctgcctgcctgcctgcccgcgtgttctgtgccacgcgtctgcctccctgcctgcctgcccgcgtgttctgtgctgcgcgtctgctgggctgctgggctccacgtgctcatctgcacatcgctgtgctcctgtgtgtctgtgcacacctgtctgtgtgtaagagagagagatagcttgcgtgcccaccctgtgcacctgagcttgtgtgtgccaatccatgtctgcctgtggggcacagcttcctggcgtgtctgggcaccctcaggcgagcatgtttctcctgcaaaatacccacgggggcacatgtctgaaaactggaattttaattcctcttgttgcaattcctgtttcaggtgttcttgaagtacctgaattttgccacgttgtacctgaagatctatcacctgagctacctccacaactgcgagacgcgccgcggccaggtacccacacgctgagcacagctctgcccacgagggccagggtccctccgcccatctcgctgcctgcacagaggcgggtggtggcaggtggtcttgtgctcacctgggtaggtcctggggtgggcattgctcaggggagaggagggctccatggcttctgtggctgtgctgagctgcaatggccagacccatctgccacctgcctgccatctggccagagtgggtgtgaggcacctgcagagggggaaaggggcacctttcctagaggctgcccccaacctccttgggagaagccagtatgagtgacgagtgagcagggagcagaggggctccctggcaggtccagccctggttgagagagggtgcaggggcaggtccggccctgactgagagagggtgtaggggcaggtccggccctggctgagagagggtacgggggcaggtctggccctggccgagacgctggggagggaggcctgaggaccttaaggagtcaggtgtgccgaggtgcgtgggaaaacgcagggggatgacctccagggcaggtggtcctcccgtctgagaccctggctcaggggagacctggatggatagtgagtgggctgggggagggaggctctatgttggggctgggaagccgtccatgcaatggcctgggggctgagccacaaaggagaactgtgaagacggcggtcacctcctgccttctccgtgtcttgttctgcctgcggatgctgcctggccctggtcacctgctgcgagcctgctgaacgtggcgagaggctgaggtctttatctcagcatctggaggaaggctgggtttaggggcctcctcctggccccagggctgcctcaggggcagtctggaaaggcggtcagggcccctggggcatccagccatccagccagtggacacctgtgagaaaaccccccggagggaagtctcagccccaatccaagcaggcctctcacggccagggccgtgggaaccagggaccagggagagcatctgtgtaatgtatctggaattcttttgcgtgagagatttgtctcttctcctcatttactaatttattcaatcatttatttatgtcagtgtggacttatgagtattgtatgcttaggttataattcaatatgattttatttattttcttgctcacgtgagtccagctttggccactggaagctcttttacttggcttctgtgccctttttacgtgaccccatcactgtggggttttgctttgctttgttttttgtttttttttttatgtttttggtttttgttttgttttgtttttgagacagggtccatctgggctcgctacaacctctgcccccccggttcaaacgatttcctgcctcagcctcccgagtagctgggatcacagacatgtgcctccaggcctggctaatttttgtatttctagtagagacggggtttcaccatgttggccaggctggtctccaacttctgacctcaagtgatctgcccacctcagcctcccagagtgctgggattactggtttgaggcaccgcaccgagcctggcttggttttgaaatggatgcccctgtctcattgtgtatttcctgccctggtcttgccatcagccacttctccagggagcctggttccttctgttggaaagcagtaacaggagccgcggcctgggggccggctgtgcttgttgccggggtcactgcttccaggccctctcgtccggcacagcgagaggcagccgtgctctgccagccctcgctcgtcccctgcgtgtgcgcagagctgcaaatgttcctgcacgtgaccatcgcgctcgagctgacgtctccaaccctggtccacgacagcgcgacacattctggcttcttcctcttgctgctgtgtgaattcccatgcaacagtgggatgcctgggagctgtcctccgcacaggcacttaattgtctgataccagcgcaggggaatagccgcgtcaggactgttcacccacaccccgtggagaacagtgttatcaagtagaatacggggttgatgaagagtttcttttgccttcagtcttactgaggccagaaggcggcttgctctgttccttcctgccagtgacgagtgagcgttcctgctgctctgcaccctcaccagcgtttggtggaactgtagtctgatgggtgtatggtagcatctcattattgctgtaatttacaatcccctaatgacagatgatgtcgcacgtctattcatttacatatttgccatctgtacatcttaatctttggtgaggtgtctgttcagatcttttgccctgtttgatggggttgtgttcttagcatttgaagagttttgtttttattttatttatttatttattggagacagggtcttactcttgtcattcaggtggagtgcaatagtgaaatcttggctcactgcaacctccgcctcccaggttcaagcgattctcctgcctcagcctccagagtagctgggattacaggcgcccaccaccacgcccagctagtttttgtatttttagtagagacggggtttcaccatgttggccaggctggtctcgaactcctgacctcaaatgatcctcctgcctcggcctcctaaagtgctgtgattacaagtgtaagccactgcacccaaccagagtttttaaatatattttcaacacaagtcctttatcagatatgtttgctttgagagcttcttgctaaattggggtcccattgagggccccaatgagggtcccagtaatgaggggtcctcgttaccctagcaggtaatgaggggggctgggcctggtgtttatcctgcacctttcacaggatcttctttcattcagtgggcagcctcgtgcctaattatccagccctcaaccaggggctcactcacacaggaaacttgttcatattggcaggtgcctgaggcttgtgtctgacccatgcccaggtcatgcctacctggccatcgctctggcacagggagcccaaccctctgttccctccagggtcccagggaaaagctggcctggggtagctcctagctcttcagatggaagcacaaattcagtccaccactgtgataggaaacacgtgcaaagatttttactacaggtcctgggcaggaaaggcaccgtgattctggagggcagttttgtttttttggggggtgtttttttttttcttgagacaaggcctcactctgctgcccaggctggagtgcggtggtgcaatcatagctcactgcagcctcaaactcctgggctcaacagatcctcctgcctcagcctcccaagcagctgggactacaggtgcaccccaccacacctgggtaattattttttttttagagacagggtcttgctgtgttgcccaggatggcagaagggcagttctgtgatgtttttcttggggtccacagttcacaggaggcagaaatggcaagtcaggcagagcaggggctctgctagcagcaaacatgagggaatagagagcaggtcccttaagttcatgggcaaatgtctgaacagccttttctaaaggaaagggggagaagtggggagcccaggcttctgggcaggagagatgcctctaagttcttatggctgccatcggcttgagccactgaggtgcagaactggaaactgtcaagggtgactaagccctgcttctggcatgagaaagttaaacttgtattcaaaagtgatgctgaggccgggcacggtggctcatgtctgcaatcccagcacttagggaggccgaggcgggcagatcacctgaggtcaagagtttgagaccagcctgggcaacacggtgaaaccctgtctctactaaaatacaaaaaattagccagacatggtggcgcatgcctgtagtcccagctactcgggaggctgaggcaggagaatcgcttgaacccaggagctgggtctccccctcaggtcctcctccccaagacctgcagtgagccgagatcaccccactgtactccagcctgggcgacagagcgagactccatctccaaaaaaataaaaaaagtgatgctgagaccaggagcagtggctcacctctacaggcccagcactttggaaggctgaggtgggagaatcacttgaggccaggaatttgagatcagcctggtcaatatagtgagaccctatctctacaaaaaaagaagagtgatttgcaaatattttctaccaagatgtggcttgtcttttaactcactttacactgtattttgcaaaatagttttaaattttattataataaagtccaattggccaggcgtggtggctcatgtaatcccagcactttgggaggccaaggcaggccaatcacctgaggtcaggagttcaagaccagcctggccaagatggtgaaaccccatctctactaaaaaaaatatgaaaattagccaggcatggtggcgggcacctgtaatcccagttactcaggaggctgaggcaagagaatcacttgaacctgggagacagaggttgcagtgagctgagatcgcaccattgcaccccagcctggacgacagagtgagactccatcttgggaaaaaaaaaatccaacttagcattttttttccctcatggattgtattttgtgttgtatctaaaaactcatcactaaacccaaggtcacctacattttctcttattgtctgctagaggttgtatagatttgtattttacgttagatgtgtgattcattttctgaaaggtgtgtaaggactgcatctagattaattttttgtgttgttgttggcatgtggaagtccagttgatccagcaccatatgtagaaaaagcctaccttttctccgtcgtattgcttttgctcttttgtcaaagatcacctggctctgttggtgagtctattcctgagctctttattctgttccactgttgtatgtgtttattcattcatgataccagaccatcttgatcactgtaggtttagagtaagtcttgaagttgggaatgtcagcgctctagttgtctttcttctgcagtattgtgctagctattctgggtttgttgcctttccacataaaccttaagagtcagtttgtcaatatccacaaagtagcttactggtattgtaattgggactgtattaaatctgtagatcaagttgggaaaaattgccatcttagaaataatgtatcttccaattgataaacacagaatatctcttcatttatttagatctttgattccttttatcagaattttgcagtttctgcatacaaatccataattttattagatttgtacctaagtatttcattttcccatggtaatgtaagagatattgggttcttaatttcaaattccaattcttcattgctgttataaagcaaagcaatggacctttgtatgttaactttgtatcctgggcagagaagaggtgagggtgaggcggtcagcgcaggagccaggtcaggctgggcagggggtccctgagtgcctgaggcctcaccttctccttggtcatgtccagggggctcaccaagtaccgtcacagccacacttttaaaaccaaggtctattgggctgtgcggcaggggcaggccacctaggcgtcccagctcctgggggacccatgaggccctgaccacagccccgcacacagccgtcagagacacacgttttttgttttttgttttttgttttctgagacagagtctcactctgtcacccaagctagagtgcagtggtgcaatctcagctcactgcaacctccacctcccgggttcaagcgactctcctgcctcagcctcccaagtagctgagactactgatgtgcatcaccatgcccacctaatttttgtatttttagtagagatggggtttcaccatgttggccaggctggtcttaaactcctgacctcaggtgatctgcccacatcagcctcccaaagtgctggaattacaggcctgagccaccataccaagccaggagttttttattgattattggtgtttttacctagacaatcatgtcatctgcaaacaaagatagttttatttcttccttctcaatctatatacattgtatttctttttcttgccttattgcactagctaggacttcaagtataatgttgaatgtgagtggtgagaggagggagatatctttgccttattcccaatcttaggagaaagcatccactttctcaccattaagaatgacatcacccagctgggcatggtggctcatgcctataatcccagcactttgggaggccaaggtgggtggatcacctgaggtcgggagtttgagatcagcctgaccaacatggagaaaaacccccatctctactaaaaatacaaaaaattagccaggcatggtggtgcatgcctataattccagctacttgggaggctgagacaggaaaatcgcttgaacctgggaggcagaggttgtggtgagccaagatcatgccattgcactccagcctgggcaacaagagtaaactccgtctgaaaaaaaacaaaactaaactaaaaaaagaatgacatcacccagcatggtggcgcatgcctataatcccagcactccggaaggctaaggcaggcagatagcttgagcccaggagcttgagaccagcctgggcaacatggcgaaacaccatctctacaaaaaatgcaaaaaagttagccaggtgtggtggtgtgtgccagcagtcccagcaactcgccactgcactccaacctggacaacagacactgtctcaaaaaaaaaaaaaaaaaaaaaaaaagaatgcccttagctctagggtttttgttgaatttttaaaatccacttgaggaagttctctctatttctagtttgctaagtgtttttattcagaatgagtgttggatttttcaaatttttttctgcattgattgataacatcatgtattttttgaacaaattgtgaacgagctttgcatacctggaataaatgccacctggtcatgtagtgtaattattattttcatacattgttaaatcggtcttgccatgttttgttaagaattttggcatctataagccgggtgtggtggctcacacctataatcccagcactttgggaggttgaggcgggcggatcacgaggtcaagagattgacaccatcctggccaacatggtgaaaccccgtctctactaaaaatgcaaaaattagctgggtatggtggcagacatctgtagtcccagctactcaggaggctgaggcaggagaatcacttgaacccgggaagtggaggttgcagcgagccaagatcatgccactgcactccagccagggagacagagcgagattccatctcaaaaaaagaaaaaaaaaaagaatttttgcatctatattcatgagctacattggtctgtagtttttctttcttataatgtctttatctggttttgctattaggataattttgacctcattgaatgagataagagtgtttcctctgcttctattttttggaagggattgtagtgaattgacataacatctttcctaaatgtttggtcagattcaccagtgaaactattagggactggtgctttctttttggatgattattaattattgattcaatttctttaatactcagagaactcttcagattcttctaattctcctggtgtgagtcttggtagtttgtgtctttctagtgatcagtctatttcatctaagttaaaatcaaattttgaggcatagagttgtcataatatttattatttattttcttctgcttgctttaggcttaatttgaagttctttttctagtttcttaagctttgagtgttgatttagatctttcttcttgtttattatgtgcattcaatactataaatttccctccaagcactgctttccctgcacctgacaaattctgacaggttgtatatttttattcttatttagttcaaaatctttttttttttttttttttttgagggagtctcgctctgtagccaggctggagtgcagtggtgggatctcggctcactgcaacctccacctcccgggttcatgccattctcctgcctcagcctcccgagtagctggaactacagacacacaccaccacacccaactaatttttgcatttttagtagagacggggtttcaccatgttggccaggatggtctcgatctctcgacctcgtgatctgcccgcctcggcctcccaaagtgctgggattacaggcgtgagccaccgtgcccctagttcaaaatcttttaaaaggtctcttcagactctggcccatctgttatttggaagtgtgttgttaaatccattttaaatttttcagctatatttctgttattgatttctaatttaattgcactatggtataagaacatatttttcattatttttattttcaaaattttgttaagatgtgttttatggcctagaatgtggtttatcttgctgtatgctccacgtgaccttgagaagaatgggtattgtgctgttggtggatgaggtaaattatagatgtcaattatgtccattcgaataacagtgtttttgttttttttatttttatttttttgagacagattctttctctgttgcccaggctggagcgcagtggtgtgatctcagctcactgcaacctccacctcgtggattcaggtgattctcccgcctcagcctcccgagtagctgggactacaggcacacgccaccacgcccacctactttttatatttttagtagagacgggatttccccatgttgcccaggttggtctcgaactcccagcctcagatgatccgcccacctcggcctcccaaagtgctgggatgacaggcgtgagccaccatgcccggcccacagtgttgtttagttcagcaatgtccttactgagcctctgcctgctggatgtgctcattctgatagagggtactaagtctccaacagtagtggaggatgcgtctctccttacagctccatcagcttttgcttcatgtgtttcgaagctttgttattagatgtgtgaacatgaatgatttttatgtcttcatagagaaacaacccctttatcatgttgtcatgccccttccaccaacaattttccttgttctaaagtactctttgtctaaattaatatagctaccccagtgtctttggattattattagcatagcatatatttcttcattccttacttttaaactatgtgtgtctttatacttacagtgggttttttatagacaacatatatagggtcaggtcttagttctttttatccgctctgaaaatctgtcaagtggtgtatttaggctagtcacatttttttttttttttttttttttgagacggagtctcgctctgtcgcccaggctggagtgcagtggcgcgatctcggctcactgcaagctccacgtcccaggttcacgccattctcctgcctcagcctcccgagtagctgggactacaggcgcccgccaccacgcccggctaattttttgtatttttagtagagacggggtttcaccgtgttagccaggatggtctcgatctcctgacctcgtgatccgcccgcctcggcctcccaaagtgctgggattacaggcgtgagccaccgcgcccggccaggctagtcacatttaaagtgattattgatatagttggattaatatataccatattcttaaacattttctctgtgttgcacttactctttattattatcatcccctctttttttctgccttctctggttttaattgaacgtcttatcccacactctctcctctcttagcttatcagttatacttgtttttccaaaaaattttagcatttccccagaatttgcaataatcatttatgactactctaagccctcttccaaatagcattatactgcttcacttagagtgtggctatcttaccacaatgtacctacaacttctcacttccacccttataaaatttctgccatttattttacttatccacgtgctataatcatgtaatacactgttactattattactttgaacaaatagctattattagagaaattaagaaaaagaaaatatgttgctttcctgtcatttatttattttctgctgctcttccttttttcacgcatatgcaagtttctgatctatctcattcttcctgtttccaaggaacttctttgaacattttctgctgggcaagtccactggtaacacattcctcagtttctgtttatctgagaaagtctttatttctccttcacttcttaaggataattttactgtatacagaattataagttagcacatttttttctcaacacttccaatacttcactctcctcttgctcgcatcgtttctgatgagatgtttccaacgtctcgttccactcttggtcagatgttcccccacccccagcttccctcgaggttttcagcttggttgtctgcagtttgaatatgacgtgccttaggatcagttttttggcatttgtcttttttgacagtcactgagcatcctagacgcgcggtttggtgtctgtcaatacttttggaaaatctcagccattattacttccaacatgtcttctccttcgctctttctgctccttccggcacccgccgcccactcgcaccttctgtatttgtctctctgctccgctcgctccgctcgtggttccctctgcgtttctgtgttcgcgctcccggcccccttcctcagacacgcgcagcctccggccgggcggcggcgcactgcgtttccacctcgcatttcctgtactccagcgcgccttgtccttcccagagcgtccatctctttgcttatgttaccatctgctccggtgcgctgcctccgttttctagtagcgcctttagcatattgatcatcataattttccttttttttttttgagacattgtcttgctctgtggccctggctggagtgcagtggctcaatctcggctcactgcagccgccgcttcctgggttccagtgattctcctgcctcagcctcctgagtagctgggattacaggtgcccaccaccgcggcccggctaatttttgtatttttagtagagatgagtgtcaccatgttggccaggctggtcttgaactcctgacttcagttgaactgcccgcctcagcctcccaaagcactagaattacaggcatgcgccacctcgcctggcctgatcatagtaattttaaattcccagtctgataattcccaacttcgtgtcacatctgagtctggttctgaggcttgctttgcctttttggactgttgctttttcttgccttttagcatgacttataatttttggccaaagcagggactggggcaaatcagccttgagtgtgggatttggggtccatctggccgggagctgggctgtattgaatgaacatttgctgcagctgagggtgacagcagcttccgcgcccttgtttatggtttgtttttgcttctgtattagcttgagctgccataacaaaataccacacaccgagcacctgagacagtgggcattcgtttctgacacttctggaggctgtgaagttccagatgaaggtgctgaccaggttccatttctggcgagggctctctccctggcttgctgtgtcctcgtcccataagggcacgtctcgtaggggccccaggctcgtgacctcacctaaccctaatcatcccccagggccccacctccactcaccatcgcatctcgggtgagggcttcacagatgcatggggggaggggcacgcaatctagtacacagcgggaaccacccagcaacagacctcagttttaaaagtgtggctctggccaggtgtgatggctcatgcctgtaatcccagcactttgggaggctgaggcgcgcagatcacctgaggtcaggagttcgagaccagcctggccaaaatggtgaaaccccatctctagtaaaaaatacaaaaaattagctgggcgtggtggtgcatgcctataaccccagctactcaggaggctgaggcaggaaaattgcttgaacccgggaggcagaggtagcagtgagccaagatcgcgccactgcactttagcctgggcaacaagagcaaaactccatctcgaaaaaaaaaagaaagaaagagccaagagtcaggcgtatttgcccgttctgttgtctggtcaccccagccctaaaccaggcaacaagtgaattaccaacacctaggaaactccttgtttccagcctctcagtctgcaggcatgtggagaccagctcaaggttctaacacgtgaccttgtgtctccatgtgagactttcgattttgcaccagacattgcccagtcctaggaaaagctgtttctgggtcttgccctccgaacggcatttttaggcatcctgacttgcaggaggcacaggcctgcctcacggctctttttgaaaataaaagtttgtgatgagcaaagattggcccccgcagtccgcccaacgcctgcacttcgtctgcctcctccttgagctgtggaaggaaagctggtcactgggattgaagcagcctctgggcgctcccccctccctctgtcccgggccctcacctggacaatcaggaactaccttctgtcccaggcaccctccagctggaggcccctgccattccctttctgaaaagcctctcggacactcccatcagagccaacagaggccgcaggaaagccatgggttaggccctacagagctcaggtttctctctgacctgtcacggcagctgcctgttcggcttagtggagcaattctcaccgcccagctgtctgagctgcagcaaagctgcatgaaaggcctgtgggtgcagggctgcagctctcaccttcaggccggccatgcgtcaggacccggtggctcgctgcaagggcggaggaggtgccccgactcaggtcaggcatgggaggagcgggggagccttctgtctctgcaggtctgactcctgcctcctgtgaggaagcagagccattcagaagtgagaggcggccaggaggggcgggcgtggtctgtccacaccgggcagtggcgggagcctgttgagctggccaacttcggacttagggccccaccatgatgagccagatggagctgtggggagatccacgctggcacagcagtccgtctgccgtagcgaagccccgagcacggccaacagcgacccacagtggggcggggcgggtgatcctgggtgtctgtcgcctttccttttaatacagtgttctagtttataggttacatgatttaattgacataatggccatgattgaattgtcataatggctatgtttaatggctggctctcagaatgcctgaggattcaacaaccagctctgagaagctcaccatgagatgaagccctctgccctgatgccaggacacacactagatttgtcaaggccctgggcccagggggaaacgtctccagaaacaaggctcctggggctggggcttcagtagggccgaggcccgtcctagcgaccaggcctccaagggacgctggggccacctgctgctgctttgaaagtgaaggagcgccattcttggattccccaggcactcgctggggtcccttatgctgaccacagcctgggaagactgttcactggtggacccacaaaggcctgggaagactgttcgctggtggacccacagaggcctgggaagactgttcgctggtggacccacaaaggcctggggttgggaccgcgtaggcctgagcgcttgcctcccaccacagctatggcccagggctcagggtcggggggagactctggccctactccactggctgggcagccagtggggatcccatctgccctggcccctcaggacctcctggcccctccttcccataagtaatgagagggccatgaggctgagcagctccccttccagggccatatgcgtctctgtgccttctgccccccatgtcagtggatccctcatttctgagtacacggggtggccaccgctgtcaccctggtttcaccctggagcattaaacctgaccccagtcaatgcaggagggacacaacctcagcttccatgcagcccagaagcccaggctgctcgaaccatccccggggccttgtggatgcagcaggtgtatcctgtaccggggtgctgggacgctgggcacgggcttggggcaggaggggcccccgctccctgaggaggggacaagtctggaaaactccagggcgggcctccagccacaccttgaaaagggggtaggtcccacccagcactggatgtttggcttaacaagttcccaacattttaaagtcgagacaattcacgtaagaattagggtttctacatctcttgaaaggctgagagctcaacactgctgggtgtccggccccccctgtccccactgcccaggacaggcagaccccaggtgcgaagcctcacagcctgcttcctccacacaggcaacagcctccatcagaggcctcagggctccccttcgatctggagttggaattgagggatgctgcccaggaagatgccagggacacctgcgtgggcagagagggcccaggaaggccccaagcgtggggtcagggcaccgaggggacagagtggagggggtcccccagcccagaaccacccaggcaccaagactcccagcagtcaggacagaaacagctccgacacccacacacagggaggggggccggcagggagggctggcgtctggaggctgcggaggcgagaaggctggttggggaggctgcgtagatgccgtttcagagcaggccagggtcggaggttggaagagccattccggagggcagggggtgttgacgggggcacagaggaatgccctgagcccgagccggcagcgaaaatccacccgccacacgctgaagacgcctgcacttcagtcagttgctgtgtgcaccagcaggcttttaaccggaaaattaaaaatgaaaacaaggaggacggcagaagcctcagggtggggctgctgggctgggaccaccttgaactcagtgcctcccctcactgaggtgccgatgtcaacggcagtggggctgtcacaggcaggacgggctgaggcggcgatgtcaacggcagtggggctgtcacaggcggggcaggggctgaggtggcgatgtcaacagcagtggggccgtcacaggcaggacagggctgaggcgccgatgtcaacagcagtggggccgtcacaggcggggcaggggctgaggcggcgatgtcaacggcagtggggccgtcacaggcggggcaggggctgaggcggcgatgtcaacagcagtggggccgtcacaggcggggcaggggctgacccgtggggtcagactgaatggggagtgggggccccaggggttggtgggtcctcagggggggcctcctggaaaggacttgaggccaggccttgggaggaggagggcctgggatgagggcctggaggcagaggccagagcccgtgcgaaggcgctgagttcggcaggagacagactgagtgtgggagggacgcagagggcgcagagggtggggccgggcctccacctgcggctctgggtgaaccagtcacgcgaggagaatgcacctggcgattccacacatctacagcgagtctcctgagccgcaggcgccggggctgtggagagccgtctccattcagcaggcgccagggctatggggagccgtctccattcagcaggctctggagctatgaagagccgtctccattcagcaggcgccggggctatggggagccgtctccattcagcaggtgccggggctgtggagagtgctagggcggtcgccatctgcacctgctgttttcccaagtcctgttctggacccactaactccagtgactgagctgacttcttcacacgggcatggggccaaagctcctgaccagtgcagggacacggggggtgggacatactcagataggggctgggaaggctgggagcttctgctgagggtggcaccagcagcagctccatgactgtgactgcggccagggcggctccacgacggtgactggggtcagggcaggagagtgtggaggccagtgaggagggtccacacccatcggtgaggcaggagtcagggtaggctgcagacccgggcggagattgcgaggcaggggtcagggtcactggagaaacatggctcaggaaaggcttcagggagaaaaaggtgttggacgagagaggctggtgctcaggggctgcaggggggccgggcctcagcagggagggagggagggactctgggaacagcagagccggcactgaggatgctgccagggaagggcactgacgtgcatggacctggaggatgccactggccaaaagctaggatctcactcacatgtgggatccgaaaaccctgaattcatggaaacagagagtggaaagggggttgcaggaggccggggcaggaagagagatagagaaagcagagacgttggtgaaagggtgcaaagcgttcgttagctggagctgtgggcttcaaggtcagccgcgctgtgtggcggccaccactgccgttaaccacagtacacagggtgctcggtaagtgcagttctgcttccgaggatttatgatgtgggaaaagttttaaattaaaaataagaataagaatgtaaaacaatacagtagaacagccgttttcatggccttgccttgcactgggtgctaagtcatcggagatgatttgaagtcctgggggtgcgtgtgcaacctctgtacaaactctaggccatttcacatccgggacttgaacatcctcggattttgttatcagagcggcgtcctggaaccaatttccctgaggatgccgagggatgactgtattgtataccaaattgctagaaaatagacttgtaatgttctcaccacaaaaaaaacaagttggtgaggtgatggatatgttgattagcttaattgaatctttctgcaacaaatacttacatcagaacatcacgccaaaccccataaaacataaaccccatcaatacacacaattattcaactgaagataaactaaaatcagtaaaatcaatgtactgggaaataaagctacgaacatctcactgcccttggcaacaggagagcctggtcctgttcccaccatgagctgagtgccagggggtggaacttcagagggcctggcagggagagagctgggctaggacaccgcagcggaggagagggagctggcaccatgcggtagaagacccagcggccgccgcgagtgtgaggaggcagggcctggtggggcctgggtctgggccttgaccaaggaggcagagaaaggtggcccaaggagggccctggggtgagtctgagcctggtggcagcgctgacccagcaaccaggggcctgtgcagcgggatgtcctgagtggggtctggccaggacctcgtggagtgcgtcagcaatgcttcactctcagacgcttggcggaggccacaggcggcctgacgtgcggaaaccacggcccgatgttctcaaagccctgctcgccgcaggtggttctggagcagccgggcggaggaagggctggtcggatgtttgcctgtcaagctcaaagcgacagattccactttccactcgtccactcctgagtgatcagggacacgaccgcagcctcgaggcctcaccgccagccagctcccgggccccacaagctcagatgaaacctggccacggagccaccaatcagggtctgtgccaggctccacggctgggcaggtggtcagatcagggagcgcacctgtgtcaggcttgagttaaacccctgctgctgtggtcagaccggcgtgagggtgggagtggccacaggcccacaggtgtgcccctccctccaggtgctgctgtggtcggccaacaaggtgtttgaggagctgacggacatcgagaggcagttccacaaggccttctacacggtgcgggcctacctcaactgcgagcggtactccgtgggcctcctggacatgaccaaggagaaggtgaggcttccgtggctcagggaccccctgcctggcccgacccaggtcccgcagtgaccgccccaccctcacctcttctctgcccaggaattttttgacgtgtggtctgtgctgatgggagagtcccagccgtactcgggcccacgcacgcctgatggccgggtgagtcttaggggaggggcccagggcctgtccacacgcctctgtttccctgactccaactccagggcaggagagggagggataggggtggggtttagggaggtgggaactggccggtgggaccccgggtgcctgtctgtggtctccaccaggctcccctgctgctgcactccagggatggggtgtccagggctggtccctgaatgagggccgccaggctggtcgtgaagacccacgtcggctctgattgtgggggctcctgctgccccatctccccacgtgggacctcctgtgcacgtgtaggatgcgtgtgtgtgtgtgtgtgtgagagtacgggcccagcttgtgtgtgggattgtgcggaacacagactgggaagacagatgtaaaccgcggcgtgtgatgcgtgtcccgtgagtattggggacggtctgcatgtgtgtgcaccctgagcctgtgcatgtgtggacatgggtgtgagtgcacccgcattcgtagaatacctgcgcacggcggagacatctgttcacgtgtgtacacatgcacggttacgtgtgtgggggtgtgcatgcgtgtggctgtgtgtagctgcatgtagctgtgtgtgtgtgtgtgagcccctcagagcttggccaggcagccccccgaccagtgtcttctgcttctcaggaaattgtcttctacaaagtgatcgactacgtcctccacggcaaggaggagatcaaggtcattccgtaagtgcaggattttaccagaagcgtccccgggggagggaccgcccctcagaccccggctcagcccccagggccgtcctcccagggcttcccacggtgcagtcagcagcaccggcctggcctggccccacctgtggtgctctgtgtgccgtggggcatagtggagttgggggtgagacagaagccgactcactgttctgggagatggtgaggaggacgtgggctgctgaggagcccgagtcactgtggacatccagagtggacatacaggggaccaggcaagctgtccaggcggcctcgtcagcaacaattgagcatgaaggccccaggatttgaccctggcaccaccagccccacccagacagtggagcctccagccaggaggccgagtcttggccccgtggggctggaagaggaggggaactccagtccggaggtcagggcaggactccagccaagggaggggcagctggtggcccagtggccctgtgatcccataagcctattgggaccccatccccaggccccaagcaggaaccaggatccaggtgccaggcttgagcacaagtcagggtcagggtggcagggcaggcaccaacgctgagtcctagaaagcaggctgaagccatacggcctccggagagggaggggttcccaagagggaggggccccagcacggcagcctggggaggaggaagaaggcagcacagccgtcctccaacccacgccctggcctcctcgcctcctgaaccccctggcactcagagaagagagtaaatgctgaggatggcacatgagccagagacccccagacccctgcacacacgcccagtccatctgaccccagtacacctacatccagcgcagcctggcccctctgacccctgcacacacacgtgcagcccagaccagcccctctgacccctgcacacacacgtgcagcctagaccagcccctctcacccctgcacacagacatccagtccctctgactcctgcacgcgcacatccagcccggcgtggcctatctgacccctgctctctgcccacagcacaccctcagccgatcactgggccctggccagcggccttccaagctacgtggcagaaagcggctttgtgagtcccgtgctgtctggagtccccacagccttgccctcactgggtgcggcgatgtgtgcttctccttgtctctgccacgtcccgccctcccggccagctccacgtgcctcagtgaagcccccagctgccctgctttacctacttaaaagctcacctcagggccacagaggccattttagatcataacagaccttccgctgttttggatgaaatcgtttttctgatgctttttcagatttgtaacatcatgaatgcttccgctgacgaaatgttcaaatttcaggtatctgtctgtgccttggtagaaattatacttacttacaaaagaggagattttgattcagcgatgatgaagtgaattcgtttttgccacttaaaaaacaacttcagccaggcatggtggctcacgcctgtaatcccagcactttgggaggctgaggcgggtggatcacctggggctgtgaccacagcccccacacacgcccgcaaggccgtgaccgcggcccccacacacccctgcgaggccgtgaccgcggcccccacacacccctgcgaggccgtgaccgcggcccccacacacccctgcgaggccgtgaccgccgccccacacacatgcccatgaaaccactcctggtgggaaaacggcctctacctcctccggtgggaaaatatcatgacacaaaaaccatggacacaaactccaaatgcagagagggagagagggaatgcagagagcagagacaggaacacgagcccagccgtcacggctctaggggagaagacatgaggtcactctccccggccacacgcccgggccagggccagcctcagggcggagctcagctctggacaccgctcccgcaggaaggggccctggacgactccgggtggctcatcaagaatgtgctgtccatgcccatcgtcaacaagaaggaggagattgtgggagtcgccacattttacaacaggaaagacgggaagccctttgacgaacaggacgaggttctcatggaggtaagcacctgggcagacgtggttccgccggggatgccctgcgaggggtggggcctgtgcggtgtgggggcctccccgccaagcattcggctgtgtgcgtgtgctcatgtgtgtgcggtatgcatgcggccagggagaggacgacaaagggcccccccgggagcaggagcctctgcagagcacccgggagaccccacacagaagcactgcgacaccatggtggcagccccaggacctgcccgccgagccacggggcctggcacacaggcacatgggagggggcgcgccgggagcgctgagcgccagtgacactgccatcccctccagtccctgacacagttcctgggctggtcagtgatgaacaccgacacctacgacaagatgaacaagctggagaaccgcaaggacatcgcacaggacatggtcctttaccacgtgaagtgcgacagggacgagatccagctcatcctggtgcggcggggcaggacgtccaggggtcacccaggggtcacggctgtgtggcaggggcaggtcgtccaggggtcacccaggggtctcggctgtgtggtgggggcaggtcatccaggggtcacccaggggtcacggctgtgcggtgggggcaggtcgtccaggggtcacccaggggtcacggctgtgcggtgggggcaggtcgtccaggggtcacccaggggtcacagctgtgcggcgggggcagggcatccaggggtcacccaggggtcatggctgtgcagcagaggcaggtcatccagggctcacccaggggtcatggctgtgcggcgggggcaggtcgtccaggggtcacccaggggtcacggctgtgcggcaggggcaggtcgtccaggggtcacccaggggtcatggctgtgtggcacaggcaggtcgtccaggggtccattgaggggtcacaggggtcatggctgtgcagcagaggcaggtcatccagggctcacccaggggtcatggctgtgcggtgggggcaggtcatccaggggtcacggctgtgtggtgggggcaggtcgtccaggggtccatccaggggtcacccagaggtcatggctctgcggcgggggcaggtcaccaggggtcacagctgtgcggtggggacaggtcaccaggggtcatggctgtatggtgggggcaagtcgccaggggtcacggctgtgtggcgggggcaggtcacccaggggtcatggatctgtggcagggacaggtcaccaggggtcacggctgtgcggcgggggcaggtcgtccaggggtcacaggtgtgcggggcaggtcacccaagggtcatggctgtgtggtgggggcaggtcacccaggggtcacaggtgtgcggggcaggtcgtccaggggtcacggctgtgtggcaggggcaggtcacccaggggtcatggctgtgcggtgggggcaggtcacccaggggtcacagctgtgtggggcaggtcacccaggggtcacggctccctctgtgcagtgggcggccaggttacccaggggtcacagctctctctgtgtggtggggacacggccctggggccagagctgagtacagccctggcatgcccccgaggtccctctgtctgcacggccctggcatcccttccctgtgctcaatctccccagccaggggccttgcatggccagagccctcctggtcatcatgagagagtcccatcattatacctgaggactgcgtaaggcagtgcccgagagaggacaggtgggaaagtcagcaggccatgcacacggtcatttgtctccagatcagaggccgccagggccttcccagggtgaaagcacaagctcttgacagcaccttcctctagctcacacggggtggacgcaccgccgtcaccttgtcccacatgcgaagctctttctcgtgacacatctgtgtctctgtgtagccaaccagagcgcgcctggggaaggagcctgctgactgcgatgaggacgagctgggcgaaatcctggtaagaaccttgctcccgtccctcccatggaggccggccacgtgtgaggctgggaggaagagttctgcattctccgggacccgacggtgctttgcacacacggtcatcagggatgttggtgctgtgtgtgtatacttgtgtatctaagcaccttagtgtacgtgtgtgtacataagcctggctttcagtctcagccagtgtgtccctgagtgtgtttgcatggccagaatgtggctttgatgtctgcactcctgagtgtatcttcgtgtcttcctgtctcctctgtgctttgccagatgtttagttttcaccggatgtttagtgggcctgacttggactctgtgtccatctatgtcatctctgctctcagagtgcctaggtgcctgcaactcccagtgtgtgtgcatccgcatgtgtgcacgcacatgggtgtctgtgtgcatgtgtgtgcacatgtgggtgtctgtgtgtgcacaagtgtgtacgtgtgtgtgcatgtaggtgtgtgtgcacacgtgggcgtctgcacaggtgtgtacatgtgtgcacatgtgggtgtgtgtgtgcacatgtgggtatgtgtgtgcgtgtgtgcattgtatgaatgtgcacatgtgtacacatgtgtgtgcacatgtgtgcccacgagtatgtgtgtgcatgtgtgtgcacatgggcgtttgtgtgtgtgtgcccgtgtgtgcacccatgtgtgtgtgctcacatgtgcacagggggtgtgtattgtgtgtgcatgtgtgtgcacatggatatatatagacacatgcttgtgtgtgtctcctagagacgattgctggatcaatgtggggattatgtggtgtccccatcaccctgtgtctgcctatgcaatttagccagaatctcccggggccacgagccttgtgagtaggccttggactgagcatgggaatgtgcctggtgggtctgaaagtccactgttgtgtgtgttacctcatggctgtgtgtgtgagcctacatgcgtgagtctgcacgtgtgtgcctgcatgtctgtgggtgtgcctgggtgctcatgtgtgtgcctgtgtgtccacaccggtgcctttgtattcatgggagtggccgtgtatccaggtgtgcctgtgtcacgtgtgtctgtatccgtgtgtgtgtgtgtttcttttcatgtgcacacctttgtgttttcttgtctcaacaacatcaccctgtccacccaactgggcaagttcttcactgttgggccacagggtacaagaggggagagtgaggctgagccaggggggcgtgtgagcagcctgggatacaggctggagcgccaggaatgacacatctcctcagagatgcctgaggtgtctgaggcttggcaggggatctggagagaagaaaggatgagaagcaagtgggggctgtggcaggccaacctccctcagcccacaatccctcccacagaaggaggagctgccagggcccaccacatttgacatctacgaattccacttctctgacctggagtgcaccgaactggacctggtcaaatgtggcatccagatgtactacgagctgggcgtggtccgaaagttccagatcccccaggaggtgggagacaccgcagggcgcatagtcaggtccctgaggccgcccaggacatgggggtggggatgtgatcagggcctcaggtgccccagaaggtgagggggatgggattgggggttccagatcccacaggaagtttagagggccgacatgttcatcacagaacaggtaaaatgcacacgggaagtaagcataaaacaaataattggatggctgggtggatggctggattgatggatggctggatgggtgaaaagcagggaggaaggagggaggttaggaaggaaggaaggccaacaggcaagcagaaagaaacaaaggaagaataaatgaatggatgggtggatgccaatggtagttggatagttggataaatggatgggtgggtgggccaatggtagttggatggttggataaatggatggatgggtgagtgggccaatggtagttagatggttggataagtgaatggataggtggatggatggagaagtgggtggatgagtgatagatgagtaggtgggtcaattaatgaattaatagatgggtcaatgaatgggtgaatggatgggtggacagcagatggatggtgaatggatagatttaaagttttattattaggagttccaagcaatttgatcattaggcacatcatctggcaataacaggggatttggtgtggggtgctgaggagatagaagcatcccatcacctaaacagaaagcacaaagtggcccccctggtttggccacagcagcactcctcggagaccccctggggaggcgggatggctttcccagccctcgtccacagctctgtgccctccctgggttctcctgccctgccctgcttccaacatctcaaggggcttcccacagccctaggaagagaatcctcttttctcatgcccctctgagaacaggtgcagcaggccagcattttcaaaagaagttttactaaatactaagggaaaacactcaagaaaaaatgtatagaaaatatttgcagaataaaaaatatttccaaataattttctgaccctaaaaatcacaatggccgcaggaagagcctcctggcgatgtccgcagggcaagagagaccagcattctcttgccctgcggacatcggttctcccaccccagcctgcagcccacacattctgctcattcaaatgtccatgcctaaaaccaacatcttaaaatatgctgcatccccaggggtcctcctcccagcttgaggccaggcagtcggatggaggctgggcggcccctgaaggctggggctgttctcagctcctgccctacctggctccaccccataggtgccaatgtggcagcccctacccaggaaggccagcagaggccagtgggaaacgcagggatggggaagatcgggaagtccaggagacggtgtggggatgatggcacggagcagggcttccactgtgaagtcagccacaggtgccgctctggcgggacttacacgcttgccgccggagccctgtgtcctctcggctcccccaggtcctggtgcggttcctgttctccatcagcaaagggtaccggagaatcacctaccacaactggcgccacggcttcaacgtggcccagacgatgttcacgctgctcatggtacgtggctgccagaatcaccagggttgtgcaggccctcctggtaccaagggcagcactcaagcaccccgagggatgagatgggggtcctcccagggcagaaggatggaggagggcaacgccctctgacaccgtgcaccgcgcaccccagccctgcggtggtcggaggtccaacctccaacccgacgcctaggtcatcccaacccctcaccactccccaccctgctggagccaggaccggtgagcaaggtggccctgtctctacagaccggcaaactgaagagctactacacggacctggaggccttcgccatggtgacagccggcctgtgccatgacatcgaccaccgcggcaccaacaacctgtaccagatgaagtaggcacctcagggcgggcatgtgaattagccctaaatcaactccacgcccttggcgtgaattaggcttcgcatagcaggctatgtagaaagtggagtccacggccaggccccgtactccagcactgtgggaggccaaggcgaggggattgcttgagcccaggagttcgagaccagcctgggcaacatggcaagagctctcctctacaaaaacttaaaaaaaaaaaaaaaaaaaaaagctgtgtatggtggcgcacacctgtggtcccagctacttaggaggctgaggtgggaggatcacttgagcccaggaggtcaaggctgtattgagccatgattgcaccactgcactccagagtgggtgacagaggcagaccctgtctcaaaaaaaagaaagtggggcccatctgggggggctgcagagcgcagggtgggccaagggcaggtcccacgggcctcacctccaccacctgtgtaacaggtcccagaaccccttggctaagctccacggctcctcgattttggagcggcaccacctggagtttgggaagttcctgctctcggaggaggttggtatactcaccctcggtttctgctgtgggcgctggggacgcagcgtccgcaggacggcagggccgtatcctgcggagcagggttctgatgcagcgggtgagcactgggtgtgtgagcactgggggagggcggcagagaaggcggagggccgaggctgagggcaggtgcatcggaggccctgggaaaacgcttgtggggaagacaactggaaagggcccctcatggggtggggtggaagccgaaggggaagcggcccgggacccaccagcgggggaatgaagggcagccgagccctgagcggcccccaaggacctggacactcagtggacccctccctgcgctccccggtggtgacctctgaggccatctgcgtcccaagccgacgatggagccgctggtggagagctgggcaccctgaggagggccctgagcagcaggcggattaggggtcccgcccaccgagggcccgagggcgggggcgtgagaggcacaggcagccgaggcggaaggggcggggtccccgggcaccctgagaggtggccgcagggcgcctgacgcgctgggcataacctccgcagaccctgaacatctaccagaacctgaaccggcggcagcacgagcacgtgatccacctgatggacatcgccatcatcgccacggacctggccctgtacttcaagtgcgcgccttccgggagggggcgcctcgcggggcgggcgggtagcctgggacccccggcagacacgggggcgcagcggcggcacagcccgggggacgcagccccggattccgtccctgcccgccggccccgcgcaccccggatggggcctcgctcgggctccgcgcctccctgcagacgggcgcttggggcggggtctccacacttgctcccacctgcacctcccttgttccctgggttcaggaagagagcgatgtttcagaagatcgtggatgagtccaagaactaccaggacaagaagagctgggtggagtacctgtccctggagacgacccggaaggagatcgtcatgtgagcgcgggcggagggggcacgaggggtccttccctcgcagggaccgggcccactcaccagctggttaaccctgcagccctccccagacgctctggagcaggaagagcccgtcgcggcagcttgtcgagggctgtgaaacaaatgcgccgtccttatttccccccagctctcagggagatggtgcagagctggggagcacacaggccctgcattggtctgtagcccttggcagtaacttacttcattttgaccttccactttttcacctgtaaaatggtgattcacaaccagcccctccccaggctggtcccagggacccagtgagaaaatacacataaacccagcacttgggaggccgaggggagtggatcacctgaggtcaggagttcgagatcagcctggccaacatggtgaaaccccgtctctaccgaaaatacaaaaattagccgggcgtggtggcgggcgcctgtaatcccagctactcgggaggctgaggcacaagaatcgggaggcggaggttgcagtgagctgagattgcgccattgcactccagcctgggcaacagagcaagactccatctcaaaaaagaaaacacatataaaccacctgccctcaggagacgcccatcagcactcgtgcccggtttgtgtctgcagggccatgatgatgacagcctgcgacctgtctgccatcaccaagccctgggaagtccagagcaaggttagaacagagggccctccagacccagagtcagtgcctctcagcacatgggactgccgggcgggcgggagcctcggatggcaacggaccattgtttgcaaggagctctgagggccacctcggggccaggccagggcggcaaggatgggggtactgcagtgtgtctacatggctcaaccggagccctgtgtggtggggaccccgggggtctggggcggagaagaccgaggctcggagcctcacggggcgggcccgggcccttccgcgtgggctcagagctccacagacagctgccttcctgtgcctccaggtcgcacttctcgtggctgctgagttctgggagcaaggtgacttggaaaggacagtcttggatcagcagcccattgtgagtgctgcttctggaaccttccactcctgaaacgggtgttagagacccctcttggtcctcaggagcctcaggtcctggcttggtctcaggcagggggttctgaggtcgtggggtccttatctcactttgtgggatcatgtgacatgcgtgtgggtggctcggacctgggtacagctgtggcttgggtgatgcttatgcagaggtgacgtcgttggcactggaggaaccagggccacccgctcatcaccaggagcctctgggtccaggcagctctgcaggtgaaccccagcagggccgcgagccatgcaccaagaaagccctggggagggtgctggggcagagaacgcatggggggcgtcccgggcccacacagtggtatgatggacaatgccagggtcctcaggtcagcagcggggtctggatacctcctggcagcaggagaggtgccagcaaatgggagagtcaggataggcgccaggaacaggagaggcagggctgccccagccccacgtggaccaggtgggagctgtggtttctcacacacccgctctggtgggcggcgaggggctctctggagcctgcagtggagagggcttaggccaggtgcagcctcggcaggaaagggggcattggttggtcagcaaagccccacaggggaaggacaggcagcaggtccatcccccgcgcccggcctctagagtcctgcatggttcaccctccaccaggacgctgtgaggggacggacagcccagggcactcggggtctgacactagaaacagctccagagcacgtctgtgtctgccccaggcgagtgcacagcgaggtcctggtcagccgagtgtctgggcagtgcagcccagcccggctcagcactgtgtacagcccatccccctccccgcctctccccagctgcagtaagggtccccagagccaagagggggctgccctcaggggaccacgggctggagccaacagcagctgtgggaagaagctgcccacagttcctaggagctgtggagccgctggccaagggagagggtgtcagcttcccctcccgagagccagtttctgtcaggcaggctcgtcccaggctgtgtctccatgagcacatctgagtgagggggtcggggggctgggcggggccccaggagctgcctccctggtcactgttctcccgccctctgttcctcccaccagcctatgatggaccggaacaaggcggccgagctccccaagctgcaagtgggcttcatcgacttcgtgtgcacattcgtgtacaaggcgagtggttcacgggtgttccgagctgactggggcagggtggctgggagcaggcaagggggcgcgggctggagtcgcgtggactcacacgggcccggcggtgtcctcactggagtagggatgccagtgccagcttcgtgccgctcttgagtggggcaaatggggaggaacatcagtttccggacccccacaggtgccccagcccatcctcaccctgctgtgcccctggaagctctgagccctttcccagcccagaatgtcctctgctagcctccaggcctaccccagaagttctccctcagtgccctccgccgtggccagcacactgttttgggggccttggctgcagctctgtgggttcatttgttccatgtttgtgaaccctcgaggcggggctgggtcggcctgtctgctggtgcacccgcccacaggggcgtttggaacagcagaaggagccacatccctgccaatctgccacagtccgatgccagctgagtctctgaggacgcaaggcggacatggagggggagactcgatggggcaggggtctgaccgtggggccctgtgtgatgcccataagagccagctgcctccggccacactccctggtgatggaatccacgccccaaggaggatgccacgggttccacatgaagttgtcccggagtgggctgtgcccactccccgccccatcctacccaccccgggtcgtcagtgctggggagaaggtgggacaagggtggatatttgggcctgaagtggccacaggtcacggccccactgcaggtgccccccactgccttccccaccccgccacactccatgtgtgatgtgcgcgagtgcacgcgtgtgctgtgcttgcatgatgtgtgccgtgtgtgtgtgggagggacgggagaaggcactgcaggggctgcctgctgtccgcctgtgcccaccacccctctgcctggcaccctgcccccaccccctgagctgttctgctcattcttgggttcctctccctgcaacactgcaccctaagcatgcataccctaaagctcccggcttcaatgtcaccaacacagcccccgaggtttctcccttcacagggctctgctgggaaggtgccccctccgtggcgctccctcctcctgccaggcagttcatcccctacgagggggatgagctggggaagggctatcttactctggagagagcaggcaggacaggactggtggtgacttctcgactcccctcaggagttctctcgtttccacgaagagatcctgcccatgttcgaccgactgcagaacaataggaaagagtggaaggcgctggctgatgagtatgaggccaaagtgaaggctctggaggagaaggaggaggaggagagggtggcagccaagaaaggtctggctctgtgtggcctgtggggcagggactcggtgactctcccaaggcaaaatgaaaagacagggcacagagcagagttaaaatggagaaaagcagagccactttcaagaagcctcgaggtggacagggccacagtgcagggagagaggccacggcgggggagagtggcagctgactccacctcggtagcaaacccggactgaaaaatttcctctgttcctagccagtgaaccccatttttcaagaaagaagtaaccatatcttatgtcctttataaaggacttagttgcaacaagtcagcacacccccaagttcaaatcccaaaggcatcgtggtcttgccattggcccgcacttggctaccttagctctgaggtttggcttgctattcccgctgctcccagtatcccatgctattcccgctaccccatgctgctcccactaccccatgctgctcccactaccccatgctgctcccactaccccatgctattcccctaccccatgctagtaccactaccccatgctattcccgctaccccatgctattcccctaccccatgctagtaccactaccccatgctattcccgctaccccatgctattcccctaccccatgctattcccgctaccccatgctgctcccactaccccacgctattcccctaccccatgctattcccgctatgccatgctattcccctaccccatgctattcctgctatgccatgctattcccctaccccatgctattcccctaccccatgctgctcccactaccccacgctattcccctaccccatgctgctcccactaccccacgctattcccctaccccatgctattcccgctatgccatgctattcccgctaccccatgctattcccctaccccatgctgctcccactaccccacgctattcccctaccccatgctgctcccactaccccacgctattcccctaccccatgctgctcccactaccccacgctattcccctaccccatgctattcccgctatgccatgctattcccgctaccccatgctattcccctaccccatgctgctcccactaccccacgctattcccctaccccatgctgctcccactaccccacgctattcccctaccccatgctgctcccactaccccacgctattcccctaccccatgctattcccgctatgccatgctattcccgctaccccatgctattcccctaccctatgctgctcccactaccccatgctattcccactactccatgctgctgccactaccccatgctagtcccactaccccatgctattcccgctaccccatgctattcccctaccccatgctattcccactaccccatgctattcccctaccccatgctatccccctaccccatgctattcccgctaccccatgctattcccctaccccatgctattcccactaccccatgctattcccactacgccatgctattcccgctaccccatgctattcccactaccccatgctattcccgctaccccatgctattcccgctacgccatgctattcccactaccccatgctattcccgctaccccatgctattcccgctaccccatgctattcccgctaccccatgctattcccctaccccatgctattcccgctacgccatgctattcccgctaccccatgctattcccgctaccccatgctattcccgctaccccatgctattcccgctaccccatgctattcccctaccccatgctatccccctaccccatgctattcccgctatcctatgctacataaacaaggcgacttcaggactatggaaggccaggatgagcataatcagggcacagtgtcaacagaggctaaagcactaagaaaggctcagcccagctaatcggcttgggctggtcacagacccaggtgctgtccttcctcctgcaggggttggtagaggtcacaccaggcaggagggaaggaatagggctggtgtgcacaggtggttccactcaccatcttctgtcttctcttgcagtaggcacagaaatttgcaatggcggcccagcacccaagtcttcaacctgctgtatcctgtgagcactggtcccatggggaccctatggctccctcaatcttcacccactaggatttgggttctgcctgtggctatttgctacaagaggttaggaagcccaagaaaatgactgaagatcattctggatattttaatttttttttttttttttttttgagatggagtcttgctctgtcacccaggctggagtgccgtggcacgatctcagctcactgcaacctccacctcccaggttcaagcgattctcgtgcctcagcctcctgagtagctgggactacaggcgcccaccaccacacatggctaatttttgtattttcagtacagatggggtttcaccatattgggcaggctggtctcgaactcctgacctcaggtgatcacccgcctcagcttcctgaagtgctgggattacaggcatgagccaccacgcccagcctgtttttataaactgaagccaactgtgaataaactgtagcctacattactcatccatttttggatagttaccactgggagacctttgaaaagggtccatgaactctgaaatcactgagaacatttgcagccacacatgtacatatgtgtacacaggtagacagatggacacaggccgtttctcatccagtttaggaaaacacacatgctcaggaattcagaataaaataaacagaaaactacttgcccattatctgtggtaaaatgatagcggaagccacactacatttgacccatcagaaaattctgccagagaggtcaaggccatgagtaaagcggccatccaacttcagtggtctgagcggaaatgatctgtaataaacaccatgtagagtggctctgatggccccagacggcaccaggagggcagtgcagggctggatgccgaagcccgtgcacccccatgattaaatattggtgagcctggagtgaaggacagaggcaaagaaacggacttcccagttgaaatcggtattatgttaaattcaggatgttcaactcatgatgtgagctccaaggcatttgctcccaacactagatgacgcttaactagatgggctcattggggtgggcgtgggagagcagcagacatgcccagcacagccatggggctgcaggaagggggtgctgggttttttgcttgagacagtctcactctgtcacccagcctggagtggagtggtgtgatcttggctcaatgcaacctccaccttccgggttcaagcaattctcctgcctcagcctcctgagtagctgggattacaggcacccatcaccacaaccagctaatttttgtatttttagtaaagacaaggtttcgccatgttggccaggctggtcttgaactcctgacctcaagtgatctgcccaccttggcctcccaaagtgctgggattacaggtgtgaaccaccgtgcccagccttttcatctcactggtcagagacccctggtatccagagcctgggtctgggatgaggggctcttaagaggttctgagggatcctgcaaacagcccctctggacgccaggacaggatgtgaaagtatcttgctcactcaaagctcaccttaaccaaatgtcctgaaaagcttataggctgcttctccctttggccttatatttgcaaacgaactcattttacaaactggggctccaagcctagatttgctcaaggcacataactgggaagtagcaaattcaatctgtccattgcaaaccaccaggccaagggtttgggttgttggcaagctcacagccaggaggggcgagaagcccaggaagcctgctggggagggaagtggctcaggcaccacaagaccacctccctgcacaactcaaacagcactcaggccctgtgctcaggaggtcacatcaccagacttttagtcccaagtctgacctggccacttcctgggatcaaagggaggatttgtgaaatggcaggttggggcgaggggttattgtggaggaggacccagcttcccaactgtaagggcgtcagtcagtgcctacccctccccatccaggggtctgggctgctgagagcagcagcctagaactcagaatcaagacaaccccagtactcatgaggcccccagctgactgactccattacagacggcctttggggctccccacctggatgccccagacagaacaggcagcgcgcatctgtccttcccactgtgtttacatgatgcattctgggtctgtgaatggtaatgtggattcttttgaaaccccctccctgtcttccacctcacgtgaactgggaggtggacagaacttcaa
